United States Patent Application Publication US 2022/0290187 A1 - sequence listing, part 2

SEQ ID NO: 2252 - protein, 1308 aa, Unknown
  Description of Unknown: uncultivated organism sequence
  Category: MG81 effectors
  Description: MG81-531 effector
MKVSKVNHVRAAVNKKGILYNTPVSEKRNVIEIKGHVREVNEKAQKLYATMGTIDEEIEKVSPKDLNNFKRVFDGYIKECAKTMSRRANKYGFDASKFRNVFEQTTYYSSKKDRTTGEWKNESIASGRFFKWNSDPKTVINQLINTYLRKSLYRTEKAGTKEVYLPDALKKLALAVYDKENFPNGVNALSYEEKTALAQAIYKDYSGEKKIDSIAESIQSQDVKVQSFSKDGKTVLKLSSAEDLNKTNPGKNKGFIFEFLKDFCNADKSGQDELRKHMRKLILLYYCGPEAYRTAEDNGIFADGFGECLPDEAESFCQDAIEEMANLPIAEEKGEKKRVRAAIKKALEEQIAASYRIAVKEPGITESDRFWIDYIEKTAGKIIVDCRMSQWQSRCMKKSLCLMTYQEWETYISSRFIDMGKAAYHFAMPKDLTSLNAASFGTVNALFKDGITSFDYEYIKAEESIEREISGYISSALNTFTASSILPAQREELLAKKDILSLRAEDENLSENMMKNILRFFGGSSVWKEKQEFSKENRVAFFSALQDRLRYVRNSSFHYASGEDTSRVKENPAVLALISGETERVGSIFAKKYYSNNVPMFYTEKDIEKMMENLYAKENFRPAQIPSFQSVVNHSDMDGVLTALVGAGYNSKIKSVGADITKQYRSAMYFVLKEIYYNDFLKLEDIKERFRREALNYKSPQATEKKDPPAESFRARISDLCEDKTITFAEICQQLMTDMQLQQGEMAKKPESKQNVTDKKAYIHFRLILESCIRSAFLDYVKNDGKYAFLLAPMYRKEAFSILKEEEFLPSFKPAKYSALLQGFDAKAESWFVLAHFLRKSELNHLIGAMKGYIEYTENIDRRAKYLSGERFNVSKKREDYKSIIPILEFVMNFNGQISNTITDYFDSEEEYADYLNSFILFAEEKDDKKIALKNFCNLPAPGSPTGKIGIFYDEQNPILNRNVVLSKMYGIDELFIGVYRKNRIKLSDYQSYYRLSKELESVFKSGVCKSEDEVKKLKKFQHMKNRVEMTDIATFTGIVNDLYSQLISWTYLRERDFMYYLLGYYYVKLYQTESVQNDSPLRTITSSDVSKAFSIQNGAVLYQIVAMNTPGLPLIVFEKDGKPSLDTANAANGTGIKVVRFVLDYLGGEETYSDVLAFFGNYKKNNDDVVKMRNYIDHFSYFAGYERSLMDLYSDFFDRFFEYDQKLHKSVSFVFKNILLRYFVISDLNFVSVYRYSYKDKKEGTDKCCGLELKKERKGGDLSLKADNVTIKYKNQNDPQKVQVFARDDEFLSRLEGILTYKRGESR

SEQ ID NO: 2253 - protein, 526 aa, Unknown
  Description of Unknown: uncultivated organism sequence
  Category: MG81 effectors
  Description: MG81-532 effector
MAKNNNNNTDTCVLTLPLRVEKWQEDCLLKRFEAARRIYNSLLNFELKKLRQLECTVEYRQIQSVISSAYRSNTKDSPECKDAFKRREKLISANGISEYGFKSDVKFFYKHFDGLIGSSVAVHCIAVQLWAAFDKYLRGSGKEIHFKRLGEISSLKGYSVKGKSGGLEIIFRGQYVEWTRKKKKLLLPLKIDPDNEYEREMLSRRVKYVRIIKKPGKNRLRWYAQLTLEGKPALKYSAETGKPIHSVGKGNVGIDIGPQTVAYASDKEVALLELADRVTNIEHQKKKLQRKLDRSRRATNPDNYKPDGTIKRGVKLTRNKSKRYLKLQSKLAYIQHRQAEIRKLQHTCLANHMLTLGDRFFVEKMNWPGLAHRAKETSISEKTGRYKRKKRFGKSLANKAPAMFISILKQKCETLGLPGVVEVDTFRLKASQYNHLSDTCEKKSLSERWNYMPISDGSDSSKTKRIQRDLYSAFLLQHTIPQSCSFDKEALRIDYPNFVTMHDAEIHRLESLPKTITSMGVRRSHS

SEQ ID NO: 2254 - protein, 508 aa, Unknown
  Description of Unknown: uncultivated organism sequence
  Category: MG81 effectors
  Description: MG81-533 effector
MADKECCVLTLPLQTEIWQEHIIEKRFAIMEHLKNQLIAKELRRLKNLERTKEYRNLIDEINNTPKEKRKALFSKRRKLLKDSGFSEYDFKDDIAGKNSLMQKHFIEHIATQIAHKLASDVWRSFDKFLFGNGRFIHFSKRGSLRSVASQKNGNGMTYKNGYFIWNGGQSKNKIILKIKVTPPKNEYEKEMLSKKIKYLRIVKKWVKTRYKYYLQFALEGKPVKKDRIVNKGNVGIDIGTQTVAISSADSVKILELADKIDKNHTKKKILQRKMDRSRRYTNPQNYNEDGTIKKPPKGQRFSWYKSKKYIQLAGKVRELERKNADIRKYQHACLANWILSLGDTVYVEQMNFSGLQRRAKETKIDKNGKYAKKKRYGKSLANKAPSMFLTILGSKLNQYGGQLNKINTYEFKASQYDHTDDTFTKHNRSERWHILSNGDKNQRDLYSAFLIMNSDISLKHCNRKKCNETYSNFKVLQDKEIERLYSDIRKGNCKNISSFGFQRNAKAM

SEQ ID NO: 2255 - protein, 540 aa, Unknown
  Description of Unknown: uncultivated organism sequence
  Category: MG81 effectors
  Description: MG81-534 effector
MATTDKKDEENLRAYKFRLDPNQAQTTALYQAVGAARYTYNMLTAYNLEVNRLRDDYWKRRHDEDISDADIKKELNALAKEDKRYKQLNYGAFGTQYLTPEKKRHEQAEHRIENGEDPSVVWNQETERSANPWLHTANQRVLVSGLQNASDAWDNFWASRTGKRAGRLVGTPRFKKKGVSRDSFTVPAPEKMGAYGTAYLRGEPAYKQGRRKITDYRHVRLSYLGTIRTFNSTKPLVKAVVAGAKIRSYTVSRNADRWYVSFLVKFSEPIRRSATKRARAAGSVGVDLGVKYLASLSDSEAPQRFPNLKFVEGLPSLENPRWSEASSRRLHKLQRALARSQKGSNRRSRLVKQIARLHHMTALRRESNLHQLTKKLATEYTLVGFEDLNVSGMTASAKGTVENPGKNVAQKSGLNRVVLDAAFGVFRNQLEYKAVWYGSAFEKVDRYFASSQTCSECGRKAKTKLTLRDRVFDCAYCGNMMDRDLNAAVNICREAQRLFDEKLASEDRESLNGRGSRGALRGAETVEASRPPASHRRGSP

SEQ ID NO: 2256 - protein, 522 aa, Unknown
  Description of Unknown: uncultivated organism sequence
  Category: MG81 effectors
  Description: MG81-535 effector
MANNNNNTDTCVLTLPLRVEKWQEDCLLKRFEAARRIYNSLLNFELKKLRQLERTVEYRQIQSVISSAYRSNTKDSPECKAALKRREKLIDANDLTEYGFKSDVKFFYKHFDGLIGSSVAVHCIAVQLWAAFNKYLCGNGKEIHFKRLGDISSLKGYSVKGKSGGCEIIFRGQYVEWTRKKKKLLLPLKIDPDNEYEREMLSRRVKYVRIIKKPGKNRLRWYAQLTLEGKPALKYSAETGKPIHSVGKGDVGIDIGPQTVAYASDKEVALLELADRVTNIEHQKKKLQRKLDRSRRATNPDNYKPDGTIKRGVKLTRNKSKRYLKLQSKLAYIQHRQAEIRKLQHTCLANHMLTLGDRFFVEKMNWPGLAHRAKETSISEKTGRYKRKKRFGKSLANKAPAMFISILKQKCETLGLPGVVEVDTFRLKASQYNHLSDTCEKKNLSERWNYMPISDGSDSSKTKRIQRDLYSAFLLQHTIPQSCSFDKEALRIDYPNFVTMHDAEIHRLESQNDHKHGCSAKS

SEQ ID NO: 2257 - protein, 521 aa, Unknown
  Description of Unknown: uncultivated organism sequence
  Category: MG81 effectors
  Description: MG81-536 effector
MMVTWKEGIPVGKSSTDTCCLTLPLKLEKWQEDRLAKRFEIARQIYNTMVRAELKKLERVKQLPEYRKNQKEIQTLDGKNSADRARLKELYGNQRKILQKQGFTEYGFKADSKDYYKHFIENIGSSVATHGIAPQVWNAFDKMLFQKDGKVVHFKRYGDVHSLKGGSVAHKSGGAEIMFRKTYIEWKGLKLPLKLSPNNAYEAEMLSYRVKYVRILRTRGKTKDRWYAQLSLEGKPAVKYDSSTGKPVHPVGRGAVGLDIGPQTLAYAAANEANLVELADQVQNIEQEKRRLQRKLDRSRRATNPDNYNENGTIRRGVKLTHNKSKRYCKLQKELSWIQHCQAETRKRQHIALANHLLSLGDCFYVEPMAWPSLTHRAKKTEVSEKTGRIKRKKRFGKSVANKAPASLIGILRLKCISLGLTGVVEVPMLLKASQYNHQSKDCAKKSLSQRWNDMPDGNRIQRDLYSAFLLQHYDSQSESFDQETLERDYPQFVRLHNQTIQRLSALPKTPSSMGIRRSVS

SEQ ID NO: 2258 - protein, 522 aa, Unknown
  Description of Unknown: uncultivated organism sequence
  Category: MG81 effectors
  Description: MG81-537 effector
MKKSSTDTCCLTLPLKLEKWQSDRLEKRFEIGRQIYNTVVRAELKKLQQVERTPQYREIEQKLKGAKQEEAKELWKKRTQLLSQSGFSEYGFKSDMKYYYQHFKENIGSSVAVHGIASQVWTAFEKVLFSKDGKMVHFKKKGELSSLRGFSQAGKSGGVEIIFRGSYVEWKGLKLPLKLSPDNDYETEMLSKRVKYVRILRQDGKTKPHWYAQLVLEGKPAIKRDPASGAPKHPIGHGVVGIDIGTRTLAYSADSKVDLIELADRVQNIEQEKMLLQRKLDRSRRATNPGNYNPDGTIKCGVKLTRNKSKRYRKIQHQLAMLQHRQADIRKRQHNELANYLLTLGDCFFVEDMDYRALTRKAKKTEISEKTGRYKRKKRFGKSIANKAPSMLIALLDQKCKSLNLEGVKKVDTAVKASQYNHQTDECKAKELKERWNIMPDGERIQRDLYSAFLLQHCRRDLPEYNRKKLQETFGNELYRVFDREALQRDYPKFVEYHRETIQRLSALPKTIASMGIRRIIS

SEQ ID NO: 2259 - protein, 495 aa, Unknown
  Description of Unknown: uncultivated organism sequence
  Category: MG81 effectors
  Description: MG81-538 effector
MAGKSDKARCVLTLPLLTEPWQEHIIEKRFRIMEHLKNSLIALELRKLKNIQRTKQYRQLKAEISNAPKENRKTLDKKRKELLINAGFSERAFKDDMTNMQKHFVEHISTHAAHKSASDVWRSFDKVLFHTGRKIHFIRRGSLSSIACQTDGNGMRFRNGMLHWNGGRCKNKVKLELRVACPKTPYECAMLEKKIKFERIIRKWVKTRYKYYVQFTLVGNAVPKPRKTGTGRVGIDIGPSSIAIASSQEVRLMELADKINQNHLRKVALQQKMDRSRRATNPDNFNENKTIRRGVKLSWHYSKHYQKLRGQVRELERKNADIRKYQHTCLANYILSLGTEVYIEQMNFKGLQARAKETTYNKNGRANRKKRFGKSIANRAPAMLVTILETKLKSYAGTELHKVNTWSYRASQYDHITDTYTKKLLRQRWAELGNGDRIQRDLYSAFLLMNSQPSLQSTDRERCSKTYSQFKSLHDQEIYRLQQTPERHLSSFGIA

SEQ ID NO: 2260 - protein, 538 aa, Unknown
  Description of Unknown: uncultivated organism sequence
  Category: MG81 effectors
  Description: MG81-539 effector
MDNEEKEKDGATCCLTLPLKLEKWQSDHLEKRFEIARQLYNTLVHAELKKKCQVERMPEYQEIMKMIDTASNQKEKWALEKKRKAFLEENGFSRNAFKADMEKYYKHFNDNIGANVALHGITAQVWIAFDKVFVDNYKQKGKVHFKKPGELCSVQGYSQKKSGGKEIMFREDRIIWNQQGNRDRKKVKREFLLKLSPDNPYEAEMLKRHVKFVRILRKDGKTKPHWYAQLVLEGKPAVKRDPASGAPKHPIGHGVVGIDIGTRTLAYSTDKEVNLLELADRVQNIEQEKRRLQRKMDRSRRATNPENYNPDGTFKRGVKLTRNKSKRYKRIQHQYAMIQHHQADIRKQQHNELANYLLTLGDCFFVENMSYCDLVHRANKTEISEKTGRYKRKKRFGKSIANKAPAMLITMLKQKCQSRGLEGVKEVDTHVRASQYNHQTDTCIEKALENRWNVMPDGERIQRDLYSAFLLQHCKQGLPEYNRKELKKEFGEELYRVFDREALQRDYPQFVAYHHMTIQRLSELPHTIPSMGIRRIIS

SEQ ID NO: 2261 - protein, 538 aa, Unknown
  Description of Unknown: uncultivated organism sequence
  Category: MG81 effectors
  Description: MG81-540 effector
MDNEEKEKDGATCCLTLPLKLEKWQSDHLEKRFEIARQLYNTLVHAELKKKCQVERMPEYQEIMKMIDAASNQKEKWALEKKRKAFLEENGFSRNAFKADMEKYYKHFNDNIGANVALHGITAQVWIAFDKVFVDNYKQKGKVHFKKPGELCSVQGYSQKKSGGKEIMFREDRIIWNQQGNRDRKKVKREFLLKLSPNNPYEAEMLKRHVKFVRILRKDGKTKPHWYAQLVLEGKPAVKRDPISSAPKHPVGHGVVGIDIGTRTLAYSTDKEVNLLELADHVQNIEQEKRRLQRKMDRSRCATNPENYNPDGTFKRGVKLTRNKSKRYRRIQHQLAMIQHHQADIRKQQHNELANYLLTLGDCFFVENMSYCDLVHRANKTEISEKTGRYKRKKRFGKSIANKAPAMLITMLKQKCQSRGLKGVKEVDTHVRASQYNHQTDTCIEKALENRWNVMPDGERIQRDLYSAFLLQHCKQGLPEYNRKELKKEFGEELYRVFDREALQRDYPQFVAYHHMTIQRLSELPHTIPSMGIRRIIS

SEQ ID NO: 2262 - protein, 482 aa, Unknown
  Description of Unknown: uncultivated organism sequence
  Category: MG81 effectors
  Description: MG81-541 effector
MDQRELRGLRTYALYCIVAAALLAVVFLFYFSRTKQNIQEQAEAQLTEVTRQYANAIKADMRGNIQTVEALAHVFGELGQGNPETIIPLITGAVGTLRLKRMGFVTLDGMAHTTDGLTFDARDRLYFKRALTASPTVAILLVDKTDNTPINVYVSPIVHKGKVLGALFATVQTDAFIMSIDDRLFNGSGQVLVTNNQGHILFRGRGPIQLARYNNIAELIPTGAPAATGNDINDISDTFGSGGLFRYDGSPYYMAHSKLEITSTDWHIFSIVPEDTLTANVGTIQREVLYLMLFFIGLSMVFLWLVLRMQGRQAKRLRRAKQFLETVIENIPGGFFRYSNDEKQEFDYISEGFLKLLGHTRASFREAYGNRFDNLVHPEDRKRVLDSINSQIKHSDYDTVEYRVTKADGRILWLFDKAQLVRDENGRHRHGHHVPAQYAAGTQNQRGALPYPHRAFRAHHLRTRPRNPLLLFLSPLQGKIRL

SEQ ID NO: 2263 - protein, 534 aa, Unknown
  Description of Unknown: uncultivated organism sequence
  Category: MG81 effectors
  Description: MG81-542 effector
MGWKSKGRGGTLVKKSSTDTCCLTLPLKLEKWQSDRLEKRFEIGRQIYNTIVHAELKKLRKLERTQQYQEIEQKLENAKQEETKELWKKKRQLLDQNGLSENHFKADMKYYYPHFKNNIASSVAVHGIASQAWTAFEKVLLSKDGKMVHFKKKGELSSLRGYSQAGKSGGIEIIFRGSYVEWKGLKLPLQLSPNNEYETEMLSKRVKYVRILRKDGKTKTHWYAQLALEGKPAVKRDSISGAPKHPVGHGVVGIDIGTRTLAYSADSKVDLIELADRVQNIEQEKMLLQRKLDRSRRATNPENYKPDGSIKQGVKLTWNNSKRYKRIQHQYAMIQHHQADIRKQQHNELANYLLTLGDCFFVEDMDYRALTRKAKKTEISEKTGRYKRKKRFGKSIANKAPSMLIALLDQKCKSLNLEGVKKVDTAVKASQYNHQTDECKAKELKERWNIMPDGERIQRDLYSAFLLQHCRRDLPEYNRKKLQETFGNELYRVFDREALQRDYPKFVEYHRETIQRLSALPKTIASMGIRRIIS

SEQ ID NO: 2264 - protein, 546 aa, Unknown
  Description of Unknown: uncultivated organism sequence
  Category: MG81 effectors
  Description: MG81-543 effector
MANVVYITFGFFRLIMTGLLQPNKNDGIFFQYYQCEVRWAPLAKATTDTCCLTLPLKLEKWHADRLEKRLEIARQIYNTLLRFELKKLHRLEESTEYIDIQNLLKETTDNVERNKLYKQLNKLRQDAGFSEYTFKADIKDFYKHFNNNIGSSVAVHGIAPQVWTAFDRLFYGSGKVVHFKKRGELTSLRGYSVAGKSGGVEIIFRGTYIEWKGLKLPIKLDPKNEYENEMLRQRIKYCRIIKKPGRSKNHWYVQLMLEGKPVIKVNKNTGELLHPVGKGAVGIDIGPQTIAYVSEKEVALKELADQINNIEQEKRVLQRKLDRSRRAMNPGNYEADGTIKRGVKLTRNKSKRYIKTQCELAYLLRRQADIRKRQHNELANHLLSLGDRFYVEDMEWPALAHRAKKTEISEKTGKFKRKKRFGKSIGNKAPSTLIGLLDLKLKSRGLEGVMRVDTKVRASQYNHLTDDYKKKELSERWNNMPDGRRIQRDLYSAFLLQHMNETQTDFDKDALIRDYEQFTVFHDQCIEELRRAPKTLASMGLVRRAS

SEQ ID NO: 2265 - protein, 341 aa, Unknown
  Description of Unknown: uncultivated organism sequence
  Category: MG81 effectors
  Description: MG81-544 effector
MLPLKIDPDNEYEREMLSRRVKYVRIIKKPGKNRLRWYAQLTLEGKPALKYSAETGKPIHSVGKGDVGIDIGPQTVAYASDKEVALLELADRVTNIEHQKKNSQRKLDRSRRATNPDNYKPDGTIKRGVKLTRNKSKRYLKLQSKLAYIQHRQAEIRKLQHTCLANHMLTLGDRFFVEKMNWPGLAHRAKETSISEKTGRYKRKKRFGKSLANKAPAMFISILKQKCETLGLPGVVEVDTFRLKASQYNHLSDTCEKKSLSERWNYMPISDGSDSSKTKRIQRDLYSAFLLQHTIPQSCSFDKEALRIDYPNFVTMHDAEIHRLESLPKTITSMGVRRSHS

SEQ ID NO: 2266 - protein, 511 aa, Unknown
  Description of Unknown: uncultivated organism sequence
  Category: MG81 effectors
  Description: MG81-545 effector
MAKCSTDTCCLTLPLRLEKWQEDRLAKRFEIARQIYNTMVRAELKKLRAMEQSEPYKANQEKIQALDWKTQADKQALKALYKERDKLLRDGGFSEYGFKSDIKNYYKHFNNNIGSSVAVHGIAPQVWAAFEKMLFKKEGKKVHFKKKGDIRSLRGYSATGKSGGVEIIFRETYIEWKGLKLPLKLSPDNIYETQMLSYRVKYVRLLRKPGKRKDRWYAQLSLEGKPVIKYNPKTGEVRHPIGKGAVGLDIGPQTLAYSAATGADLVELANQVQNVEQEKRRLQRKLDRSRRATNPGNYADDGTIRRGIALTHNKSKRYLRTQQELKYLQHQQAEIRKRQHTELANHLLSLGDCFYVEKMVWTSLTHRAKETEISEKTGKIKRKKRFGKSVANKAPATLIGILQRKSAALGIPGVIEVPTSVKASQYNHQSGTYTPKPLSQRWNNMPDGERIQRDLYSAFLLQHYDPQTNTFDANSLHQDYPQFVQYHRDAVLRLYAMPKTPSSMGIKRSLR

SEQ ID NO: 2267 - protein, 313 aa, Unknown
  Description of Unknown: uncultivated organism sequence
  Category: MG81 effectors
  Description: MG81-547 effector
MVANNEIKYYRVVRKWMKTKYKYYLQITFAGKPADKHREISTGRVGIDIGTQTIAIASDKSVKLLELADKVNKNHIKKCELQRKLDRSRRYTNPDNFNPDGTVRRGTKGHKLKWNKSKHYLEIAGKIRELERKNSDIRKYQHTCLANDILAMGNQIYIEPMNYKGLQKRAKETQVDEKGRYKKKKRFGKSLANKAPSMFVTILKTKAEQHGGEVYEVDIMSYRASQCDHTTGEYTKHGLNDRWRILGNGDKVQRDLYSAFLIKNSNKTHDEIDLDKCSKTYDSFKKLHDKEIENIRNEVKLRERKNISSYGIA

SEQ ID NO: 2268 - protein, 512 aa, Unknown
  Description of Unknown: uncultivated organism sequence
  Category: MG81 effectors
  Description: MG81-548 effector
MKKSNTDTCCLTLPLKLEKWQEDRLAKRFEIARQLYNTLVHAELKRLAQVKQTAEYRENERKIRALDWNDPGDQTKLKGLYKERRKSLKTAGFTDYSFTTDMGKYYKHFRDNIGSSVAVHGIAPQVWAAFDKLLFKKGGKKVHYKKPGEVNSVQGYSRTGKSGGTEIMFRGPYIEWKGLKLPLKLSPDNAYETDMLQRRVKLVRLVRRPGKRRDRWYAQLVLEGKPAIKADPVTGKAVHPIGSGPVGLDIGPQTLAYSAAGAAGLVELADRVQNIEQEKHCLQRKMDRSRRATNPDNYAEDGTIRRGVKLTHNKSKRYRRSQQELKYLQHRQAEIRKLQHIQLANHLLSLGDHFYVEKMEWSSLTHRAKKTVISEKTGKPRSKKRFGKSIANKAPAMLIEILRQKCKSLGLPNVVEINPADIKASQYNHLTGEYVKKSLSRRWNEMQDGEHLQRDLYSAFLLQHYDSMSKALDLDSLARDYPAFVQYHHREIERLHALLKTPASMGIRRSIA

SEQ ID NO: 2269 - protein, 429 aa, Unknown
  Description of Unknown: uncultivated organism sequence
  Category: MG81 effectors
  Description: MG81-549 effector
MLKDAGFSQYTFMDDMAGKKSLMQKHFESHINVQIAHKAAIDVWSSFEKFLFGTGQIVHYQKRGTLSSVASKSPKTGMFYYSDENIFKWSGGGTKPKGGIILCLRVASVKTNYEKEMVANNEIKYYRVVRKWMKTKYKYYLQITFAGKPADKHREISTGRVGIDIGTQTIAIASDKSVKLLELADKVNKNHIKKCELQRKLDRSRRYTNPDNFNPDGTVKRGTKGHKLKWNKSKHYLEVAGKIRELERKNADIRKYQHTCLANDILAMGNQIYIEPMNYKGLQKRAKETQVDEKGRYKKKKRFGKSLANKAPAMFVTILKTKAEQHGGEVYEVDIMSYRASQCDHTTGEYTKHGLNDRWRILGNGDKVQRDLYSAFLIKNSNKTHDEIDLDKCSKTYDSFKKLHDKEIENIRNEVILRKRRNISSYGIA

SEQ ID NO: 2270 - protein, 538 aa, Unknown
  Description of Unknown: uncultivated organism sequence
  Category: MG81 effectors
  Description: MG81-550 effector
MDNEEKEKDGATCCLTLPLKLEKWQSDHLEKRFEIARQLYNTLVHAELKKKCQVERMPEYQEIMKMIDAASNQKEKWALEKKRKAFLEENGFSRNAFKADMEKYYKHFNDNIGANVALHGITAQVWIAFDKVFVDNYKQKGKVHFKKPGELCSVQGYSQKKSGGKEIMFREDRIIWNQQGNRDRKKVKREFLLKLSPDNPYEAEMLKRHVKFVRILRKDGKTKPHWYAQLVLEGKPAVKRDPISSAPKHPVGHGVVGIDIGTRTLAYSADNKVDLIELADRVQNIEQEKRRLQRKMDRSRRAMNPENYNSDGTFKRGVKLTRNKSKRYRRIQHQLAMIQHHQADIRKQQHNELANYLLTLGDCFFVENMSYCDLVHRANKTEISEKTGRYKRKKRFGKSIANKAPAMLITMLKQKCQSRGLKGVKEVDTHVRASQYNHQTDTCIEKALENRWNVMPDGERIQRDLYSAFLLQHCKQGLPEYNRKELKKEFGEELYRVFDREALQRDYPQFVAYHHMTIQRLSELPHTIPSMGIRRIIS

SEQ ID NO: 2271 - protein, 522 aa, Unknown
  Description of Unknown: uncultivated organism sequence
  Category: MG81 effectors
  Description: MG81-551 effector
MKRSSTDTCCLTLPLKLEKWQSDRLEKRFEIGRQIYNTIVHAELKKLRKLERTQQYQEIEQKLENAKQEETKELWKKKRQLLDQNGLSENHFKADMKHYYPHFKDNIASSVAVHGIASQAWTAFEKVLLSKDGKMVHFKKKGELSSLRGYSQTGKSGGIEIIFRGSYVEWKGLKLPLKLSPDNDYETEMLSKRVKYVRILRQDGKTKPHWYAQLVLEGKPAVKRDPISGAPKHPIGRGVVGIDIGTRTLAYSADSKVDLIELADRVQNIEQEKLLLQRKLDRSRRATNPENYKPDGTIKKGVKLTRNKSKRYRRIQHQLAMIQHHQADIRKQQHNELANYLLTLGDCFFVEDMDYRALTRKAKKTEISEKTGRYKRKKRFGKSIANKAPAMLITMLKQKCQSRGLKGVKEVDTHVRASQYNHQTDTCIEKALENRWNVMPDGERIQRDLYSAFLLQHCKQGLPEYNRKELKKEFGEELYRVFDREALQRDYPQFVAYHHMTIQRLSELPHTIPSMGIRRIIS

SEQ ID NO: 2272 - protein, 505 aa, Unknown
  Description of Unknown: uncultivated organism sequence
  Category: MG81 effectors
  Description: MG81-552 effector
MAKATTDTCCLTLPLKLEKWQADRLEKRLEIARQIYNTLLHFELKKLRRLEESKEYIEIQNLLKETTDHAARKGLFKQLNELRRAAGFSEYTFKSDIKDYYKHFKDNIGSNVAVHGIAPQVWAAFDRLFYGNGKSVHFKQRGELTSLRGYSVAGKSGGVEIIFRETLIEWKGLKLPIKLDSKNAYENEMLQQRVKYCRIVKRPGKTASRWYVQLMLEGRPVLKVDRRTGELRHPVGQGAVGIDIGPQTIAYVADGEVALKELADQLGNIEREKRVLQRRLDRSRRATNPNNYAPDGTIKRGTKLTRNKSKRYLKSQRELSFLLHRQAELRKRQHNELANHLLSLGDRFYVEDMEWPALTHRAKETEISEKTGKYKRKKRFGKSVGNKAPAMLLGLLDIKLKSRGLEGVVKVPTSVRASQYNHLTDDYRKKELGERWNTMPDGRRIQRDLYSAFLLQHMNEARSDFDKTALSADYERFVTLHDQCIEELRRAPKTLASMGLVRRAR

SEQ ID NO: 2273 - protein, 511 aa, Unknown
  Description of Unknown: uncultivated organism sequence
  Category: MG81 effectors
  Description: MG81-553 effector
MKRSGTDTCCLTLPLRLEKWQEDRLAKRFEIARQIYNTMVRTELKKLRKMELSQTYRSIQEQIQALDWKNQNDKQQLRSLYNERDQLLKKNGFTEYGFKSDIKYYYKHFNDNIGSSVAVHGIAPQVWAAFEKMLFRKEGKKVHYKKRDDIHSLRGYSVTGKSGGAEIIFRETYIEWKGLKLPLKLSPHNAYETEMLSRRVKYVRLLRKPGKRKDRWYAQLSLEGKPAIKHDPASGELRHPVGRGAVGLDIGPQTLAYSACCAADLVELADRVQNIEQVKRLLLRKMDRSRRTTNPDNYTDDGTIRRGVKLTHNKSKRYQRTQRELRYLQHCQAEMRKRQHIELANHLLTLGDRFYVEDMAWPSLTRRAKETAISEKTGTIKRKKRFGKSIANKAPAALIGILEQKCYSLGLPGVVKVPTSLKASQYNHQSGEYTPKPLSQRWNNMPDGERIQRDLYSAFLLQHYDSQTGNFDPVLLQQDYPQFVQYHHCAIQRLSAMPRTLSSMGIQRSLR

SEQ ID NO: 2274 - protein, 505 aa, Unknown
  Description of Unknown: uncultivated organism sequence
  Category: MG81 effectors
  Description: MG81-554 effector
MARSTSDTCCLTLPLKIEKWQADRLEKRLEIARQIYNTLLRFELKKLKQMEAREDYLAIQEQLKETKNDAERKKLYKQIEKIRSETGFSEYSFKTDIKAFYKHFQENIGSSVAVHGIASQVWIAFDKLFHGSGKAVHFKKRGELTSVRGYSVAGKSGGIEIIFRNTFIEWKGLKLPIKLDPSNAYETEMLQKRVKYCRIIKKPGKNKNHWYVQLSLEGKPAVKYHQQTGEILHPVGHGNVGIDIGPQTIAYVADGEIELKELADQVNNIERKKRVLLRKMDRSRRATNPDNYNPDGTIKRGVKLTKNKSKRYIKCQRQLAHLMRQQAETRKRQHNELANHLLSLGDHFYIEDMEWPSLTHRSTKTEISEKTGKFKRKKRFGKSVGNKAPATLTTLLDLKLKSRGLEGVTKVNTMVRASQYNHITDDYQKKKLSDRWNNMPDGRKIQRDLYSAFLLQHMNETHDGFDKAALCRDYEQFTVLHDQCIKRLEQLKKTIASMGIVRKPS

SEQ ID NO: 2275 - protein, 536 aa, Unknown
  Description of Unknown: uncultivated organism sequence
  Category: MG81 effectors
  Description: MG81-555 effector
MDNEEKKEDGATCCLTLPLKLEKWQSDHLEKRFEIARQLYNTLVHAELKRIHRIERMPEYREIERQIEATTDKKEKWALKNQKKQFLRKNGINRNTFTTDMKRLYKHFNDNIGSNVAQHGIVSQVLTAFEKVYIENQSGEVHFKKPGDLRSVQGYSQKKSGGVEIMFREGKIIWNQQGNNDRKGVAREFPLKLSPDNSYEAEMLKKHVKFVRILRNEGKTKPHWYAQLVLEGKPAIKRDPASGAPKHPVGHGVVGIDIGTRTLAYSTDSKVDLIELADRVQNTEQEKMLLQRKLDRSRRATNPENYKPDGTIKKGVKLTRNKSKRYRKIQHQLAMLQHRQADIRKRQHNELANYLLTLGDCFFVEDMDYRALTRKAKKTEISEKTGRYKRKKRFGKSIANKAPSMLIALLDQKCKSLNLEGVKKVDTAVKASQYNHQTDECKAKELKERWNIMPDGERIQRDLYSAFLLQHCRRDLPEYNRKKLQEAFGNEVYRVFDREALQRDYPKFVEYHRETIQRLSALPKTIASMGIRRIIS

SEQ ID NO: 2276 - protein, 554 aa, Unknown
  Description of Unknown: uncultivated organism sequence
  Category: MG81 effectors
  Description: MG81-556 effector
MDNEEKEKDGATCCLTLPLKLEKWQSDHLEKRFEIARQLYNTLVHAELKRIHRIERMPEYREIERQIEATTDKKEKWALKNQKKQFLRKNGINRNTFTTDMKRFYKHFNDNIGSNVAQHGIVSQVLTAFEKVYIENQSGEVHFKKPGDLRSVQGYSQKESGGKEIMFRNGKIIWTQQENDDRKKSPKYQQRKKRQNYKGVKGIAREFPVVFSKNNPYEAEMLTKHVKFVRILRKDGKTKPHWYAQLVLEGKPAVKRDPISSAPKHPVGHGVVGIDIGTRTLAYSTDKEVNLLELADRVQNIEQEKRRLQRKMDRSRRAMNPENYNSDGTFKRGVKLTRNKSKRYRRIQHQLAMIQHHQADIRKQQHNELANYLLTLGDCFFVENMSYCDLVHRANKTEISEKTGRYKRKKRFGKSIANKAPAMLITMLKQKCQSRGLKGVKEVDTHVRASQYNHQTDTCIEKALENRWNIMPDGERIQRDLYSAFLLQHCKQGLPEYNRKELKKEFGEELYRVFDREALQRDYPQFVAYHHMTIQRLSELPHTIPSMGIRRIIS

SEQ ID NO: 2277 - protein, 512 aa, Unknown
  Description of Unknown: uncultivated organism sequence
  Category: MG81 effectors
  Description: MG81-557 effector
MPTKQKEDSNRCVLTLPLLTEPWQEHIIEKRFKIIEHLKNQLISIELRKLKNLQRTKAYKNLIKQIESVPKSERTVLYKERNKMLKDAGFSQYTFMDDMAGKKSLMQKHFESHINVQIAHKAAIDVWSSFEKFLFGTGQIVHYQKRGTLSSVASKSPKTGMFYYSDENIFKWSGGGTKPKGGIILCLRVASVKTNYEKEMVANNEIKYYRVVRKWMKTKYKYYLQITFAGKPADKHREISTGRVGIDIGTQTIAIASDKSVKLLELADKVNKNHIKKCELQRKLDRSRRYTNPDNFNPDGTVKRGTKAHKLKWNKSKHYIEIAGKIRELERKNADIRKYQHTCLANDILAMGNQIYIEPMNYKGLQKRAKETQVDEKGRYKKKKRFGKSLANKAPAMFVTIMKTKAEQHGGEVYEVDIMSYRASQCDHTTGEYTKHGLNDRWRILGNGDKVQRDLYSAFLIKNSNKTHDEIDLDKCSKTYDSFKKLHDKEIENIRNEVKLRERKNISSYGIA

SEQ ID NO: 2278 - protein, 526 aa, Unknown
  Description of Unknown: uncultivated organism sequence
  Category: MG81 effectors
  Description: MG81-558 effector
MAKKNNNDTDTCVLTLPLRVEKWQEDCLLKRFEAARRIYNSLLNFELKKLRQLERTVEYRQIQSVISSAYRSNTKDSPECKDAFKRREKLISANGISEYGFKSDVKFFYKHFDGLIGSSVAVHCIAVQLWAAFDKYLRGSGKEIHFKRLGDISSLKGYSVKGKSGGLEIIFRGQYVEWTRKKKKLLLPLKIDPDNEYEREMLSRRVKYVRIIKKPGKNRLRWYAQLTLEGKPALKYSAETGKPIHSVGKGDVGIDIGPQTVAYASDKEVALLELADRVTNIEHQKKKLQRKLDRSRRATNPDNYKPDGTIKRGVKLTRNKSKRYLKLQSKLAYIQHRQAEIRKLQHTCLANHMLTLGDRFFVEKMNWPGLAHRAKETSISEKTGRYKRKKRFGKSLANKAPAMFISILKRKCETLGLPGVVEVDTFRLKASQYNHLSDTYEKKSLSERWNYMPISDGSDSSKTKRIQRDLYSAFLLQHTIPQPCSFDKEALRIDYPSFVTMHDAEIHRLESLPKTITSMGVRRSHS

SEQ ID NO: 2279 - protein, 522 aa, Unknown
  Description of Unknown: uncultivated organism sequence
  Category: MG81 effectors
  Description: MG81-559 effector
MKRSSTDTCCLTLPLKLEKWQSDRLEKRFEIGRQIYNTIVHAELKKLRKLERTQQYQEIEQKLENAKQEETKELWKKKRQLLDQNGLSENHFKADMKYYYPHFKDNIASSVAVHGIASQAWTAFEKVLLSKDGKMVHFKKKGELSSLRGYSQAGKSGGIEIIFRGSYVEWKGLKLPLQLSPNNEYETEMLSKRVKYVRILRKDGKTKTHWYAQLALEGKPAVKRDSISGAPKHSVGHGVVGIDIGTRTLAYSTDSAVNLLELADRVQNIEQEKRRLQRKMDRSRRAMNPGNYKPDGSIKQGVKLTWNNSKRYKRIQHQYAMIQHHQADIRKQQHNELANYLLTLGDCFFVENMSYCDLAHRANKTEISEKTGRYKRKKRFGKSIANKTPAMLITMLKQKCQSRGLEGVKEVDTHVCASQYNHQTDTCIKKALENRWNIMPDGERIQRDLYSAFLLQHCRRDLPEYNGKELQKEFGEELYRVFDREALQRDYPQFVAYHHMTIQRLSELPHTIPSMGIRRIIS

SEQ ID NO: 2280 - protein, 526 aa, Unknown
  Description of Unknown: uncultivated organism sequence
  Category: MG81 effectors
  Description: MG81-560 effector
MNNEEKEKDGATCCLTLPLKLEKWQSDRLEKRFEIGRQIYNTIVHAELKKLRKLERTQQYQEIEQKLENAKQEETKELWKKKRQLLDQNGLSENHFKADMKHYYPHFKDNIASSVAVHGIASQAWTAFEKVLLSKDGKMVHFKKKGELSSLRGYSQAGKSGGIEIIFRGSYVEWKGLKLPLKLSPDNDYETEMLSKRVKYVRILRKDGKTKTHWYAQLALEGKPAVKRDSISGAPKHPVGHGVVGIDIGTRTLAYSTDKEVNLLELADRVQNIEQEKRRLQRKMDRSRRAMNPGNYKPDGSIKQGVKLTWNNSKRYKRIQHQYAMIQHHQADIRKQQHNELANYLLTLGDCFFVENMSYCDLVHRANKTEISEKTGRYKRKKRFGKSIANKAPAMLITMLKQKCQSRGLEGVKEVDTHVRASQYNHQTDTCIEKALENRWNVMPDGERIQRDLYSAFLLQHCKQGLPEYNRKELKKEFGEELYRVFDREALQRDYPQFVAYHHMTIQRLSELPHTIPSMGIRRIIS

SEQ ID NO: 2281 - protein, 341 aa, Unknown
  Description of Unknown: uncultivated organism sequence
  Category: MG81 effectors
  Description: MG81-561 effector
MLPLKIDPDNEYEREMLSRRVKYVRIIKKPGKNRLRWYAQLTLEGKPALKYSAETGKPIHSVGKGDVGIDIGPQTVAYASDKEVALLELADRVTNIEHQKKKLQRKLDRSRRATNPDNYKPDGTIKRGVKLTRNKSKRYLKLQSKLAYIQHRQAEIRKLQHTCLANHMLTLGDRFFVEKMNWPGLAHRAKETSISEKTGRYKRKKRFGKSLANKAPAMFISILKQKCETLGLPGVVEVDTFRLKASQYNHLSDTCEKKSLSERWNYMPISDGSDSSKTKRIQRDLYSAFLLQHTIPQPCSFDKEALRIDYPNFVTMHDAEIHRLESLPKTVTSMGVRRSHS

SEQ ID NO: 2282 - protein, 554 aa, Unknown
  Description of Unknown: uncultivated organism sequence
  Category: MG81 effectors
  Description: MG81-562 effector
MDNEEKKEDGATCCLTLPLKLEKWQSDHLEKRFEIARQLYNTLVHAELKRIHRIERMPEYREIERLIEATTDKKEKWALKNQKKQFLRKNGINRNTFTTDMKRLYKHFNDNIGSNVAQHGIVSQVLTAFEKVYIENQSGEVHFKKPGDLRSVQGYSQKESGGKEIMFRNGKIIWTQQENDDRKKSPKYQQRKKRQNYKGVKGIAREFPVVFSKNNPYEAEMLTKHVKFVRILRKDGKTKPHWYAQLVLEGKPAIKRDPASGAPKHPVGHGVVGIDIGTRTLAYSADSKVDLIELADRVQNIEQEKMLLQRKLDRSRRATNPENYKPDGSIKQGVKLTWNNSKRYKRIQHQYAMIQHHQADIRKQQHNELANYLLTLGDCFFVEDMDYRALTRKAKKTEISEKTGRYKRKKRFGKSIANKAPSMLIALLDQKCKSLNLEGVKKVDTAVKASQYNHQTDECKAKELKERWNIMPDGERIQRDLYSAFLLQHCRRDLPEYNRKKLQETFGNELYRVFDREALQRDYPKFVEYHRETIQRLSALPKTIASMGIRRSIS

SEQ ID NO: 2283 - protein, 484 aa, Unknown
  Description of Unknown: uncultivated organism sequence
  Category: MG81 effectors
  Description: MG81-563 effector
MAKNNNNNDTDTCVLTLPLRVEKWQEDCLLKRFEAARRIYNSLLNFELKKLRQLERTVEYRQIQSVISSAYRSNTKDSPECKDAFKRREKLISANGISENGFKSDVKFFYKHFDGLIGSSVAVHCIAVQLWAAFDKYLSGSGKEIHFKRLGDISSLKGYSVKGKSGGCEIIFRGQYVEWTRKKKKLLLPLKIDPDNEYEREMLSRRVKYVRIIKKPGKNRLRWYAQLTLEGKPALKYSAETGKPIHSVGKGNVGIDIGPQTVAYASDKEVALLELADRVTNIEHQKKKLQRKLDRSRRATNPDNYKPDGTIKRGVKLTRNKSKRYLKLQSKLAYIQHRQAEIRKLQHTCLANHMLTLGDCFFVEKMNWPGLAHRAKETSISEKTGRYKRKKRFGKSLANKAPAMFISILKRKCETLGLPGVVEVDTFRLRASQYNHLSDTYEKKSLSERWNYMPISDGSDSSKTKRIQRDLYSASTHDTAALFF

SEQ ID NO: 2284 - protein, 511 aa, Unknown
  Description of Unknown: uncultivated organism sequence
  Category: MG81 effectors
  Description: MG81-564 effector
MAKCSTDTCCLTLPLRLEKWHEDRLAKRFEIARQIYNTMVRAELKKLRAMEQSEPYKANQEKIQALDWKTQADKQALKALYKERDKLLQDGGFSERGFKSDIKNYYKHFNNNIGSNVAVHGIAPQVWAAFEKMLFKKEGKKVHFKKKGDIHSLRGYSVTRKSGGVEIIFRETYIEWKGLKLPLKLSPDNIYETQMLSYRVKYVRLLRKPGKRKDRWYAQLSLEGKPVIKYNPKTGEVRHPIGKGAVGLDIGPQTLAYSAATGADLVELANQVQNVEQEKRRLQRKLDRSRRATNPGNYADDGTIRRGIALTHNKSKRYLRTQQELKYLQHQQAEIRKRQHTELANHLLSLGDCFYVEKMVWTSLTHRAKETEISEKTGKIKRKKRFGKSVANKAPATLIGILQRKSAALGIPGVIEVPTSVKASQYNHQSGTYTPKPLSQRWNNMPDGERIQRDLYSAFLLQHYDPQTNTFDANSLHQDYPQFVQYHHDAVLRLYAMPKTPSSMGIKRSLR

SEQ ID NO: 2285 - protein, 497 aa, Unknown
  Description of Unknown: uncultivated organism sequence
  Category: MG81 effectors
  Description: MG81-565 effector
MAKNEQNCCVLTLPLLTEPWQEHIIETRFDIVEKLKNTLIGFELRKLKQLERTRAWKRLMKSIRECSDEKQKKSLFKERNTMLKDAGFTEFGFSGDVTKLAVHKHFVPHIGANIAQRSGQDVWRSFEKYLFSNGKAVHFHKRGSLDSIACKKPRGDGMTIDSDVFTWKGGRCDDCVILKIRIRRPKNAYEREMIQKEIRNMRVVRKWIKTRYKYYLQITYQGAPVSKHRPVGKNRVGIDIGTQTIAWSSPTEVRLAELAAGIRRNHAEKTALQRKMDRSRRTANPQNYNPDGTIKRGIKLRWVKTKHYLRMEGRVRELERKNADIRKNEHICLANHILSLGKEVYIEDMNFKGLQGRAKETKVDKNGRFARKKRFGKSLANRAPSMFVTILENKLKSAGGNLYKVNTRTFKASQYDHTADEYRKKTLGQRWNHLKNGDKIQRDLYSAFLLMNAAPTLEEPDKKLCKKTYPQFALLHDAEMERLNAEEKPHLSSMGIR

SEQ ID NO: 2286 - protein, 383 aa, Unknown
  Description of Unknown: uncultivated organism sequence
  Category: MG81 effectors
  Description: MG81-566 effector
MHFKKKGELSSLRGYSQTGKSGGIEIIFRGSYVEWKGLKLPLKLSPDNDYETEMLSKRVKYVRILRQDGKTKPHWYAQLVLEGKPAVKRDPISGAPKHPIGRGVVGIDIGTRTLAYSADSKVDLIELADRVQNIEQEKLLLQRKLDRSRRATNPENYKPDGTIKKGVKLTRNKSKRYRRIQHQLAMIQHHQADIRKQQHNELANYLLTLGDCFFVEDMDYRALTRKAKKTEISEKTGRYKRKKRFGKSIANKAPSMLIALLDQKCKSLNLEGVKKVDTAVKASQYNHQTDECKAKELKERWNIMPDGERIQRDLYSAFLLQHCRRDLPEYNRKKLQETFGNELYRVFDREALQRDYPKFVEYHRETIQRLSALPKTIASMGIS

SEQ ID NO: 2287 - protein, 1302 aa, Unknown
  Description of Unknown: uncultivated organism sequence
  Category: MG81 effectors
  Description: MG81-567 effector
MKISKVDHIKTGVSELPIESGGMMYYYPGSNSKNVELRKHITQLCNRARNLYNVFVEPKAAKGKSLDKEICNTLNFYFKNYILKRVDDGNNDDGIYNNICTRNFNARPVMINFKEVNVTEINVQNVIDRCLRQSLRKKFAYNEKTFFIPDVIKKIGIVVFAHDKYLNEIKNISKDEAIALIKALREDYTKENMVETVAASIEKQNVPVQISKDGEQLVLSGSFNEKKAYIFEFMKKYASDEKGQDELLKHMRYLMLLYFYGKDTADDALNDDRFGAWNYGITLNEYKEILFSGEAADIRAELDNVPTNMKGKIRNLEDQLVNTIQKAVVAHYKNAIDGDELSDDDKKWVGFISDRVESKLLKICKSKGRDNGYKLTCKYLCEDLWDEWISFMAMKFVDMGKAVYHFAMEDRDAVTTGKTVSFGRVNSNYKNGLSSFDYERIKASDSFSRSLANYVLFAINNFDTSVRTPEERAKNKKEDILSDNSPVISDDAKKHILRFFGGASNYENTEVDTADTNTLFKECKCCLSAARNTSFHFVSGKNRFGDMPVINAIFKVEQSKAGKIYRKRMYSNNVPMFYAVKDIDDFMSSLYTSVRNDPAQIPSFNKVISRKEIYSFISEFILRDNREVLNNTEIAEIFKSSLYFVLKEIYYYDFINQKDIMDRFMKSINNLKAKDRKEQEAHNDFKKRIDQLKADGIGFGELCQEIMTEYNLQNNQKSKKPSAVKVKDKDGNVSVKEIKDDKTIYKHYVMLLYLGIRQAFYDYINEGKYAFLKKPNKRDLPDEEVFISGWTAKMYDSINLNNDVLMSWYITAHFLDQKQLNHLIGQFKTYVSYIDGIEKRAGATGNKQVKESEDNKKLYIDMITLLEFVKLYCGSVSNKIEDYFENADDYAKYIAGFVDFGGEDKNALQAFCNKKYKFEGDSVTLGKYFDAMNPILDRNVVLASMYGDRELLSAVADKVNEKEITKFYKLKEKAVEIMSENTSEPGELRKLREYQNLKNRIELVDVLSLTELTTALMSQLVGYTALRERDLMYMQLGYYYTKLFHTDSVEKDSYLRKLKGDCDIEDGAVLYQIAAMYSYDLPLYERDEDGISHAPKKPVSIGNKVKKFSEAYCRESKEAGNEYEIYKAGLNLFENISGKKDGRHDEYVDFRIYIDHLKYFAYHDMSILQMYSKLYGGFFSYSTKLRKSVSYVMPNILLSDFVNVKLGFDYKEEGMGDVTYRIPDIVIKEISSDYLSYKEFKSIVSSGNEVLKDGKRFVITGDFVNKNAKKPRKDNKPVSVPARSKSYLDAVSRLLAYRTDMK

SEQ ID NO: 2288 - protein, 530 aa, Unknown
  Description of Unknown: uncultivated organism sequence
  Category: MG81 effectors
  Description: MG81-568 effector
MILLANNNNNNNTDTCVLTLPLRVEKWQEDCLLKRFEAARRIYNSLLNFELKKLRQLERTVEYRQIQSVISSAYRSNTKDSLECKDAFKRRKKLTDENGISEYGFKSDVKFFYKHFDGLIGSSVAVHCIAVQLWAAFDKYLRGSGKEIHFKRLGDISSLKGYSVKGKSGGCEIIFRGQYVEWTRKKKKLLLPLKIDPDNEYEREMLSRRVKYVRIIKKPGKNRLRWYAQLTLEGKPALKYSAETGKPIHSVGKGDVGIDIGPQTVAYASDKEVALLELADRVTNIEHQKKKLQRKLDRSRRATNPDNYKPDGTIKRGVKLTRNKSKRYLKLQSKLAYIQHRQAEIRKLQHTCLANHMLTLGDRFFVEKMNWPGLAHRAKETSISEKTGRYKRKKRFGKSLANKAPAMFISILKRKCETLGLPGVVEVDTYNLKASQYNHLSDTYEKKSLSERWNYMPISDGSDSSKTKRIQRDLYSAFLLQHTIPQPCSFDKEALRIDYPNFVTMHDAEIHRLESLPKTVTSMGVRRSHS

SEQ ID NO: 2289 - protein, 538 aa, Unknown
  Description of Unknown: uncultivated organism sequence
  Category: MG81 effectors
  Description: MG81-569 effector
MNNEEKEKDGATCCLTLPLKLEKWQSDHLDKRFEIARQLYNTLVHAELKKKCQVERMPEYQEIMKMIDAASNQKEKWALEKKRKAFLEENGFSRNAFKADMEKYYKHFNDNIGANVALHGITAQVWIAFDKVFVDNYKQKGKVHFKKPGELCSVQGYSQKKSGGKEIMFREDRIIWNQQGNRDRKKVKREFLLKLSPDNPYEAEMLKRHVKFVRILRKDGKTKPHWYAQLVLEGKPAVKRDPASGAPKHPIGHGVVGIDIGTRTLAYSTDKEVNLLELADHVQNIEQEKRRLQRKMDRSRRATNPENYNPDGTFKRGVKLTRNKSKRYRRIQHQLAMIQHHQADIRKQQHNELANYLLTLGDCFFVENMSYCDLVHRANKTEISEKTGRYKRKKRFGKSIANKAPAMLITMLKQKCQSRGLEGVKEVDTHVRASQYNHQTDTCIEKALENRWNVMPDGERIQRDLYSAFLLQHCKQGLPEYNRKELKKEFGEELYRVFDREALQRDYPQFVAYHHMTIQRLSELPHTIPSMGIRRIIS

SEQ ID NO: 2290 - protein, 511 aa, Unknown
  Description of Unknown: uncultivated organism sequence
  Category: MG81 effectors
  Description: MG81-570 effector
MAKCSTDTCCLTLPLRLEKWQEDRLAKRFEIARQIYNTMVRAELKKLRAMEQSEPYKANQEKIQALDWKTQADKQALKALYKERDKLLRDGGFSEYGFKSDIKNYYKHFNNNIGSNVAFHGIAPQVWAAFEKMLFKKEGKKVHFKKKGDIHSLRGYSAAGKSGGVEIIFRETYIEWKGLKLPLKLSPNNIYETQMLSYRVKYVRLLRKPGKRKDRWYAQLSLEGKPVIKYNPKTGEVRHPIGKGAVGLDIGPQTLAYSAATGADLVELANQVQNVEQEKRRLQRKLDRSRRATNPGNYADDGTIRRGIALTHNKSKRYLRTQQELKYLQHQQAEIRKRQHTELANHLLSLGDCFYVEKMVWTSLTHRAKETEISEKTGKIKRKKRFGKSVANKAPATLIGILQRKSAALGIPGVIEVPTSVKASQYNHQSGTYTPKPLSQRWNNMPDGERIQRDLYSAFLLQHYDPQTNTFDANSLHQDYPQFVKYHHDAVLRLYAMPKTPSSMGIKRSLR

SEQ ID NO: 2291 - protein, 522 aa, Unknown
  Description of Unknown: uncultivated organism sequence
  Category: MG81 effectors
  Description: MG81-571 effector
MKRSSTDTCCLTLPLKLEKWQSDRLEKRFEIGRQIYNTVVRAELKKLQQVERTPQYREIEQKLKGAKQEEAKELWKKRTQLLSKSGFSEYGFKSDMKYYYQHFKENIGSSVAVHGIASQVWTAFEKVLFSKDGKMVHFKKKGELSSLRGYSQAGKSGGVEIIFRGSYVEWKGLKLPLKLSPDNDYETEMLSKRVKYVRILRQDGKTKPHWYAQLVLEGKPAIKRDPASGAPKHPVGHGAVGIDIGTRTLAYSADSKVDLIELADRVQNIEQEKLLLQRKLDRSRRATNPENYKPDGTIKKGVKLTRNKSKRYRKIQHQLAMLQHRQANIRKRQHNELANYLLTLGDCFFVEDMDYRALTRKAKKTEISEKTGRYKRKKRFGKSIANKAPSMLIALLDQKCKSLNLEGVKKVDTAVKASQYNHQTDECKAKELKERWNIMPDGERIQRDLYSAFLLQHCRRDLPEYNRKKLQETFGNEVYRVFDREALQRDYPKFVEYHRETIQRLSALPKTIASMGIRRIIS

SEQ ID NO: 2292 - protein, 538 aa, Unknown
  Description of Unknown: uncultivated organism sequence
  Category: MG81 effectors
  Description: MG81-572 effector
MDNEEKKEDGATCCLTLPLKLEKWQSDHLEKRFEIARQLYNTLVHAELKKKCQVERMPEYQEIMKMIDAASNQKEKWALEKKRKAFLEENGFSRNAFKADMEKYYKHFNDNIGANVALHGITAQVWIAFDKVFVDNYKQKGKVHFKKPGELCSVQGYSQKKSGGKEIMFREDRIIWNQQGNRDRKKVKREFLLKLSPDNPYEAEMLKRHVKFVRILRKDGKTKPHWYAQLVLEGKPAVKRDPASGAPKHPVGHGVVGIDIGTRTLAYSTDKEVNLLELADRVQNIEQEKRRLQRKMDRSRRATNPENYNPDGTFKRGVKLTRNKSKRYRRIQHQLAMIQHHQADIRKQQHNELANYLLTLGDCFFVENMSYCDLVHRANKTEISEKTGRYKRKKRFGKSIANKAPAMLITMLKQKCQSRGLEGVKEVDTHVRASQYNHQTDICIEKALENRWNVMPDGERIQRDLYSAFLLQHCKQGLPEYNRKELKKEFGEELYRVFDREALQRDYPQFVAYHHMTVQRLSELPHTIPSMGIRRIIS

SEQ ID NO: 2293 - protein, 595 aa, Unknown
  Description of Unknown: uncultivated organism sequence
  Category: MG81 effectors
  Description: MG81-573 effector
MVDLKKQLCSSASNSENQGVRFQTVVLYTKFVHKSVQLSPESSVFAVALFVRMMYNTKYQAKRGDPVGEKKNNNNNNTDTCVLTLPLRVEKWQEDCLLKRFEAARRIYNSLLNFELKKLRQLERTVEYRQIQSVISSAYRSNTKDSPECKAALKRREKLIDENGLTKNGFKNDVKFFYKHFDGLIGSSVAVHCIAVQLWAAFNKYLCGNGKEIHFKRLGDISSLKGYSVKGKSGGCEIIFRGQYVEWTRKKKKLLLPLKIDPDNEYEREMLSRRVKYVRIIKKPGKNRLRWYAQLTLEGKPALKYSAETGKPIHSVGKGDVGIDIGPQTVAYASDKEVALLELADRVTNIEHQKKKLQRKLDRSRRATNPDNYKPDGTIKRGVKLTRNKSKRYLKLQSKLAYIQHRQAEIRKLQHTCLANHMLTLGDRFFVEKMNWPGLAHRAKETSISEKTGRYKRKKRFGKSLANKAPAMFISILKQKCETLGLPGVVEVDTFRLKASQYNHLSDTCEKKSLSERWNYMPISDGSDSSKTKRIQRDLYSAFLLQHTIPQSCSFDKEALRIDYPNFVTMHDAEIHRLESLPKTITSMGVRRSHS

SEQ ID NO: 2294 - protein, 511 aa, Unknown
  Description of Unknown: uncultivated organism sequence
  Category: MG81 effectors
  Description: MG81-574 effector
MKKSNTDTCCLTLPLKLEKWQEDRLAKRFEIARQIYNTMVHAELKKLRNIENSQPYRQIQKQIEALNWKNQNDKARLKSLYNDRNKLLNTIGFSEYGFKADIKYYYKHFNDNIGSSVAVHGIAPQVWAAFEKMLFHKEGKKVHYKKKDDIHSLHGYSVTGKSGGVEIIFRKTYIEWKGLKLPLKRSPDNAYETEMLGRRVKYVRLLRKPGKRKDCWYAQLSLKGKPAIKRDPESGKRRHSIGRGAVGLDIGPQTLAYSACGAADLVELADQVQNIEQMKRRLQRKLDRSRRATNPDNYADNGTIRRGVKLTHNKSNRYRRTQRELRYLQHCQAEIRKRQHIELANHLLALGDCFYVEDMAWPSLTHRAKETAISEKTGRIKRKKRFGKSVANKAPATLIGILEQKCNSLGLPGVVKVPTSLRASQYNHQSGEYTSKPLSQRWNNMPDGERIQRDLYSAFLLQHYDSKAGNFDSALLQQDYPQFVQYHHRAIQRLSTVPKTLSSMGIQRSLR

SEQ ID NO: 2295 - protein, 511 aa, Unknown
  Description of Unknown: uncultivated organism sequence
  Category: MG81 effectors
  Description: MG81-575 effector
MGKSSTDTCCLTLPLKLEKWQEDRLAKRFEIARQIYNTMVRAELKKLERVKQLPEYRKNQKEIQALDWKNSADKQRLKELYGNQRKILQKQGFTEYGFKADSKDYYKHFIENIGSSVATHGIAPQVWNAFDKMLFQKDWKVVHFKRHGDVHSLKGGSVTHKSGGAEIMFRKTYIEWKGLKLPLKLSPNNAYEAEMLSYRVKYVRILRTRGKTKDRWYAQLSLEGKPAVKYDSNTGKPVHPVGRGAVGLDIGPQTLAYAAADEANLVELADQVQNIEQEKRRLQRKLDRSRRATNPDNYNENGTIRRGVKLTHNKSKRYCKLQKELSWIQHCQAETRKRQHIALANHLLSLGDCFYVEPMAWPSLTHRAKKTEVSEKTGKIKRKKRFGKSVANKAPASLIGILKLKCISLGLTGVVEVPMLLRASQYNHQSKDYEKKSLSQRWNNMPDGNRIQRDLYSAFLLQHYDSQSESFDQETLERDYPQFVRLHNQTIQRLSALPKTPSSMGIRRSVS

SEQ ID NO: 2296 - protein, 512 aa, Unknown
  Description of Unknown: uncultivated organism sequence
  Category: MG81 effectors
  Description: MG81-576 effector
MPTKQKEGGNRCVLTLPLLTEPWQEHIIEKRFKIIEHLKNQLISIELRKLKNLQRTKAYKNLIKQIESVPKSERTALYKERNKMLKDAGFSQYTFMDDMAGKKSLMQKHFESHINVQIAHKAAIDVWSAFEKFLFGSGQMIHYQKRGTLSSVASKSPKTGMFYYSDENIFKWSGGGTKPKGGIILCLRVASVKTNYEKEMVANNEIKYYRVVRKWMKTKYKYYLQITFAGKPADKHREISTGRVGIDIGTQTIAIASDKSVKLLELADKVNKNHIKKCELQRKLDRSRRYTNPDNFNPDGTVKRGTKGHKLKWNKSKHYLEVAGKIRELERKNADIRKYQHTCLANDILAMGNQIYIEPMNYKGLQKRAKETQVDEKGRYKKKKRFGKSLANKAPAMFVTILKTKAEQHGGEVYEVDIMSYRASQCDHTTGEYTKHGLNDRWRILGNGDKVQRDLYSAFLIKNSNKTHDEIDLDKCSKTYDSFKKLHDKEIENIRNEVILRKRRNISSYGIA

SEQ ID NO: 2297 - protein, 529 aa, Unknown
  Description of Unknown: uncultivated organism sequence
  Category: MG81 effectors
  Description: MG81-577 effector
MILLAKKNNNDTDTCVLTLPLRVEKWQEDCLLKRFEAARRIYNSLLNFELKKLRQLERTVEYRQIQSVISSAYRSNTKDSPECKAALKRREKLIDENGLTKNGFKNDVKFFYKHFDGLIGSSVAVHCIAVQLWAAFNKYLCGNGKEIHFKRLGDISSLKGYSVKGKSGGCEIIFRGQYVEWTRKKKKLLLPLKIDPDNEYEREMLSRRVKYVRIIKKPGKNRLRWYAQLTLEGKPALKYSAETGKPIHSVGKGDVGIDIGPQTVAYASDKEVALLELADRVTNIEHQKKKLQRKLDRSRRATNPDNYKPDGTIKRGVKLTRNKSKRYLKLQSKLAYIQHRQAEIRKLQHTCLANHMLTLGDRFFVEKMNWPGLAHRAKETSISEKTGRYKRKKRFGKSLANKAPAMFISILKQKCETLGLPGVVEVDTFRLKASQYNHLSDTCEKKSLSERWNYMPISDGSDSSKTKRIQRDLYSAFLLQHTIPQSCSFDKEALRIDYPNFVTMHDAEIHRLESLPKTITSMGVRRSHS

SEQ ID NO: 2298 - protein, 511 aa, Unknown
  Description of Unknown: uncultivated organism sequence
  Category: MG81 effectors
  Description: MG81-578 effector
MKKSNTDTCCLTLPLKLEKWQEDRLAKRFEIARQIYNTMVHAELKKLRNIENSQPYRQIQKQIEALNWKNQNDKARLKSLYNDRNKLLNTIGFSEYGFKADIKYYYKHFNDNIGSSVAVHGIAPQVWAAFEKMLFHKEGKKVHYKKKDDIHSLHGYSVTGKSGGVEIIFRKTYIEWKGLKLPLKRSPDNAYETEMLGRRVKYVRLLRKPGKRKDCWYAQLSLKGKPAIKRDPESGERRHSIGRGAVGLDIGPQTLAYSACGAADLVELADQVQNIEQMKRRLQRKLDRSRRATNPDNYADNGTIRRGVKLTHNKSNRYRRTQRELRYLQHCQAEIRKRQHIELANHLLALGDCFYVEDMAWPSLTHRAKETAISEKTGRIKRKKRFGKSVANKAPATLIGILEQKCNSLGLPGVVKVPTSLRASQYNHQSGEYTSKPLSQRWNNMPDGERIQRDLYSAFLLQHYDSKAGNFDSALLQQDYPQFVQYHHRAIQRLSTVPKTLSSMGIQRSLR

SEQ ID NO: 2299 - protein, 511 aa, Unknown
  Description of Unknown: uncultivated organism sequence
  Category: MG81 effectors
  Description: MG81-579 effector
MAKKSATDTCCLTLPLLTEKWQSDRLEKRFEIARQIYNTLLNYELKKLRRLEQSAEYTAIQAAIQKSYEAGKTDKAELKSLFQEREKLRRAAGFSEYDFKTDIKTFYKHFNDNIGSSVAVHGIAPQVWQGFDQLFYGNGKAVHFKRRGDIKSLRGYSVAGKSGGVEIIFRGSYIEWKGLKLSLKLGKNNAYEAEMLQKRVKYCRIVKKAGKHKTHWYVQLMLEGTPAQKCDVNTGELRHPVGRGAVGIDIGPQTIAYAAEAEVALKELADGVKNIEQEKRLLQRKLDRSRRSTNPDNFAADGTIKRGVKLNWHKSKRYIRLQHELAVLQRQQAEVRKRQHTELANHLLSLGDRFYVEDMEWPALTHRAKETAISEKTGRYKRKKRFGKSVANKAPAMLIAILDQKLRSRGLDGVIKVKTSVRASQFNHMTGEYQKKSLAQRWNDMPDGRRIQRDLYSAFLLQHMNAAQDGFDVAALNRDYENFAVLHKRVIEELRTASKTLSSMGITRSVS

SEQ ID NO: 2300 - protein, 587 aa, Unknown
  Description of Unknown: uncultivated organism sequence
  Category: MG81 effectors
  Description: MG81-580 effector
MRNGNKPTDGLLWYPRRAVFDTSHQKRPCALRGGTGEYDVGWARSRWRTALTTGTGACHAPVGGGERTDSPTEVGRHPDAFEVTLPRLFAFGFGCGGFVLGEAFMADHRKIYNTMVRAELKKLDRVKQLPEYRKNQKEIQALDWKNSADKQRLKEQYGNQRKILQKQGFTEYGFKADSKDYYKHFIENIGSSVATHGIAPQVWNAFDKMLFQKDGKVVHFKRYGDVHSLKGGSVAQKSGGAEIMFRKTYIEWKGLKLPLKLSPNNAYEAEMLSYRVKYVRILRTRGKTKDRWYAQLSLEGKPAVKYDSNTGKPVHPVGRGAVGLDIGPQTLAYAAANEANLVELADQVQNIEQEKRRLQRKLDRSRRATNPDNYNENGTIRKGVKLTHNKSKRYCKLQKELSWIQHYQAETRKRQHIALANHLLSLGDCFYVEPMAWPSLTHRAKKTEISEKTGKIKRKKRFGKSVANKAPASLIGILKLKCISLGLTGVVEVPMLLKASQYNHQSKDYAPKSLSQRWNDMPDGNRIQRDLYSAFLLQHHDSQSESFDQETLERDYPQFVRLHNQTIQRLSALPKTPSSMGIRRSVS

SEQ ID NO: 2301 - protein, 525 aa, Unknown
  Description of Unknown: uncultivated organism sequence
  Category: MG81 effectors
  Description: MG81-581 effector
MANNNNNTDTCVLTLPLRVEKWQEDCLLKRFEAARRIYNSLLNFELKKLRQLERTVEYRQIQSVISSAYRSNTKDSPECKAALKRREKLIDENGLTKNGFKNDVKFFYKHFDGLIGSNVAVHCIAVQLWAAFDKYLRGSGKEIHFKRLGDISSLKGYSVKGKSGGREIIFRGQYIEWTRKKKKLLLPLKIDPDNEYEREMLSRRVKYVRIIKKPGKNRLRWYAQLTLEGKPALKYSAGTGKPIHSVGKGNVGIDIGPQTVAYASDKEVALLELADRVTNIEHQKKKLQRKLDRSRRATNPDNYKPDGTIKRGVKLTRNKSKRYLKLQSKLAYIQHRQAEIRKLQHTCLANHMLTLGDRFFVEKMNWPGLAHRAKETSISEKTGRYKRKKRFGKSLANKAPAMFISILKRKCETLGLPGVVEVDTYSLKASQYNHLSDTYEKKSLSERWNYMPISDGSDSSKTKRIQRDLYSAFLLQHTIPQPCSFDKEALRIDYPNFVTMHDAEIHRLESLPKTVTSMGVRRSHS

SEQ ID NO: 2302 - protein, 499 aa, Unknown
  Description of Unknown: uncultivated organism sequence
  Category: MG81 effectors
  Description: MG81-582 effector
MLTAYNLEVNRLRDDYWKRRHDEDISDADIKKELNALAKEDKRYKQLNYGAFGTQYLTPEKKRHEQAEHRIENGEDPSVVWNQETERSANPWLHTANQRVLVSGLQNASDAWDNFWASRTGKRAGRLVGTPRFKKKGVSRDSFTVPAPEKMGAYGTAYLRGEPAYKQGRRKITDYRHVRLSYLGTIRTFNSTKPLVKAVVAGAKIRSYTVSRNADRWYVSFLVKFSEPIRRSATKRARAAGSVGVDLGVKYLASLSDSEAPQRFPNLKFVEGLPSLENPRWSEASSRRLHKLQRALARSQKGSNRRSRLVKQIARLHHMTALRRESNLHQLTKKLATEYTLVGFEDLNVSGMTASAKGTVENPGKNVAQKSGLNRVVLDAAFGVFRNQLEYKAVWYGSAFEKVDRYFASSQTCSECGRKAKTKLTLRDRVFDCAYCGNMMDRDLNAAVNICREAQRLFDEKLASEDRESLNGRGSRGALRGAETVEASRPPASHRRGSP

SEQ ID NO: 2303 - protein, 538 aa, Unknown
  Description of Unknown: uncultivated organism sequence
  Category: MG81 effectors
  Description: MG81-583 effector
MNNEEKEKDGATCCLTLPLKLEKWQSDHLEKRFEIARQLYNTLVHAELKKKCQVERMPEYQEIMKMIDAASNQKEKWALEKKRKAFLEENGFSRNAFKADMEKYYKHFNDNIGANVALHGITAQVWIAFDKVFVDNYKQKGKVHFKKPGELCSVQGYSQKKSGGKEIMFREDRIIWNQQGNRDRKKVKREFLLKLSPDNPYEAEMLKRHVKFVRILRKDGKTKPHWYAQLVLEGKPAVKRDSISGAPKHPVGHGVVGIDIGTRTLAYSTDKEVNLLELADRVQNIEQEKRRLQRKMDRSRRAMNPGNYKPDGSIKQGVKLTWNNSKRYKRIQHQYAMIQHHQADIRKQQHNELANYLLTLGDCFFVENMSYCDLAHRANKTEISEKTGRYKRKKRFGKSIANKAPAMLITMLKQKCQSRGLEGVKEVDTHVCASQYNHQTDTCIKKALENRWNIMPDGERIQRDLYSAFLLQHCRRDLPEYNRKELQKEFGEELYRVFDREALQRDYPQFVAYHHMTIQRLSELPHTIPSMGIRRIIS

SEQ ID NO: 2304 - protein, 511 aa, Unknown
  Description of Unknown: uncultivated organism sequence
  Category: MG81 effectors
  Description: MG81-584 effector
MKKSNTDTCCLTLPLKLEKWQEDRLAKRFEIARQIYNTMVHAELKKLRNIENSQPYRQIQKQIEALNWKNQNDKARLKSLYNDRNKLLNTIGFSEYGFKADIKYYYKHFNDNIGSSVAVHGIAPQVWAAFEKMLFHKEGKKVHYKKKDDIHSLHGYSVTGKSGGVEIIFRKTYIEWKGLKLPLKRSPDNAYETEMLGRRVKYVRLLRKPGKRKDCWYAQLSLEGKPAIKRDPESGERRHSIGRGAVGLDIGPQTLAYSACGAADLVELADQVQNIEQMKRRLQRKLDRSRRATNPDNYADNGTIRRGVKLTHNKSNRYRRTQRELRYLQHCQAEIRKRQHIELANHLLALGDCFYVEDMAWPSLTHRAKETAISEKTGRIKRKKRFGKSVANKAPATLIGILEQKCNSLGLHGVMKVPTSLRASQYNHQSGEYTSKPLSQRWNNMPDGERIQRDLYSAFLLQHYDPKAGNFDSALLQQEYPQFVQYHHRAIQRLSAVPKTLSSMGIQRSLR

SEQ ID NO: 2305 - protein, 538 aa, Unknown
  Description of Unknown: uncultivated organism sequence
  Category: MG81 effectors
  Description: MG81-585 effector
MNNEEKEKDGATCCLTLPLKLEKWQSDHLEKRFEIARQLYNTLVHAELKKKCQVERMPEYQEIMKMIDAASNQKEKWALEKKRKAFLEENGFNRNAFKADMEKYYKHFNDNIGANVALHGITAQVWIAFDKVFVDNYKQKGKVHFKKPGELCSVQGYSQKKSGGKEIMFREDRIIWNQQGNRDRKKVKREFLLKLSPDNPYEAEMLKRHVKFVRILRKDGKTKPHWYAQLVLEGKPAVKRDSASGAPKHPVGHGVVGIDIGTRTLAYSTDKEVNLLELADRVQNIEQEKRRLQRKMDRSRRATNPENYNPDGTFKRGVKLTRNKSKRYRRIQHQLAMIQHHQADIRKQQHNELANYLLTLGDCFFVENMSYCDLVHRANKTEISEKTGRYKRKKRFGKSIANKAPAMLITMLKQKCQSRGLEGVKEVDTHVRASQYNHQTDICIEKALENRWNVMPDGERIQRDLYSAFLLQHCKQGLPEYNRKELKKEFGEELYRVFDREALQRDYPQFVAYHHMTIQRLSELPHTIPSMGIRRIIS

SEQ ID NO: 2306 - protein, 522 aa, Unknown
  Description of Unknown: uncultivated organism sequence
  Category: MG81 effectors
  Description: MG81-586 effector
MKRSSTDTCCLTLPLKLEKWQSDRLEKRFEIGRQIYNTIVHAELKKLRKLERTQQYQEIEQKLENAKQEETKELWKKKRQLLDQNGLSEDHFKADMKYYYPHFKDNIASNVAVHGIASQAWTAFEKVLFSKDGKMVHFKKKGELSSLRGYSRAGKSGGVEIIFRGSYVEWKGLKLPLKLSPDNDYETEMLSKRVKYVRILRKDGKTKTHWYAQLALEGKPAVKRDSISGAPKHPVGHGVVGIDIGTRTLAYSTDSEVNLLELADRVQNIEQEKRRLQRKMDRSRRAMNPGNYKPDGSIKQGVKLTWNNSKRYKRIQHQYAMIQHHQADIRKQQHNELANYLLTLGDCFFVEDMSYCDLVHRANKTEISEKTGRYKRKKRFGKSIANKAPAMLITMLKQKCQSRGLEGVKEVDTHVRASQYNHQTDTCIEKALENRWNVMPDGERIQRDLYSAFLLQHCKQGLPEYNRKELKKEFGEELYRVFDREALQRDYPQFVAYHHMTIQRLSELPHTIPSMGIRRIIS

SEQ ID NO: 2307 - protein, 508 aa, Unknown
  Description of Unknown: uncultivated organism sequence
  Category: MG81 effectors
  Description: MG81-587 effector
MADKECCVLTLPLQTENWQEHIIEKRFAIMEHLKNQLIAKELRRLKNLERTKEYRILIDEINNTPKEKRKALFSKRRKLLKDSGFNRNKFKDDMAVMQKHFEEHIATQIAQEAASDVWRSFDKYLFNNGKYIHFTRKGSLSSINCQKINNGMKYIDGYFIWTCGICSGKRDRRIILKIKVTPPKNEYEKEMLSKKIKYLRIVKKWVKTRYKYYLQFALEGKPVKKDRIVNKGNVGIDIGTQTVAISSADSVKLLELADKIDKNHTKKKILQRKMDRSRRYTNPQNYNEDGTIKKPPKGQRYCWYKSKKYIQLAGKVRELERKNADIRKYQHTCLANWILSLGDTVYVEQMNFSGLQRRAKETKIDKNGKYAKKKRYGKSLANKAPSMFLTILESKLNQYGGQLNKINTYEFKASQYDHTDDTFTKHNRSERWHILSNGDKNQRDLYSAFLIMNSDISLEHCNREKCNETYSNFKVLQDKEIERLYSDIRKGNCKNISSFGFQRNAKAM

SEQ ID NO: 2308 - protein, 534 aa, Unknown
  Description of Unknown: uncultivated organism sequence
  Category: MG81 effectors
  Description: MG81-588 effector
MGWKSKGRGGTLVKRSSTDTCCLTLPLKLEKWQSDRLEKRFEIGRQIYNTIVHAELKKLRKLERTQQYQEIEQKLENAKQEETKELWKKKRQLLDQNGLSENHFKADMKYYYPHFKDNIASSVAVHGIASQAWTAFEKVLLSKDGKMVHFKKKGELSSLRGYSQAGKSGGIEIIFRGSYVEWKGLKLPLKLSPDNDYETEMLSKRVKYVRILRKDGKTKTHWYAQLALEGKPAVKRDSISGAPKHPVGHGVVGIDIGTRTLAYSTDKEVNLLELADRVQNIEQEKRRLQRKMDRSRRAMNPGNYKPDGSIKQGVKLTWNNSKRYKRIQHQYAMIQHHQADIRKQQHNELANYLLTLGDCFFVENMSYCDLAHRANKTEISEKTGRYKRKKRFGKSIANKAPAMLITMLKQKCQSRGLEGVKEVDTHVCASQYNHQTDTCIKKALENRWNIMPDGERIQRDLYSAFLLQHCRRDLPEYNRKELQKEFGEELYRVFDREALQRDYPQFVAYHHMTIQRLSELPHTIPSMGIRRIIS

SEQ ID NO: 2309 - protein, 521 aa, Unknown
  Description of Unknown: uncultivated organism sequence
  Category: MG81 effectors
  Description: MG81-589 effector
MLILGRRMYMPTKQKEDSNRCVLTLPLLTEPWQEHIIEKRFKIIEHLKNQLISIELRKLKKLQRTKAYKNLIKQIESVPKSERTALYKERNKMLKDAGFSQYTFMDDMAGKKSLMQKHFESHINVQIAHKAAIDVWSSFEKFLFGTGQIVHYQKRGTLSSVASKSPKTGMFYYPDENIFKWSGGGTKPKGGIILCLRVASVKTNYEKEMVANNEIKYYRVVRKWMKTKYKYYLQITFAGKPADKHREISTGRVGIDIGTQTIAIASDKSVKLLELADKVNKNHIKKCELQRKLDRSRRYTNPDNFNPDGTVKRGTKGHKLKWNKSKHYLEIAGKIRELERKNADIRKYQHTCLANDILAMGNQIYIEPMNYKGLQKRAKETQVDEKGRYKKKKRFGKSLANKAPAMFVTILKTKAEQHGGEVYEVDIMSYRASQCDHTTGEYTKHGLNDRWRILGNGDKVQRDLYSAFLIKNSNKTHDEIDLDKCSKTYDSFKKLHDKEIENIRNEVILRKRRNISSYGIA

SEQ ID NO: 2310 - protein, 512 aa, Unknown
  Description of Unknown: uncultivated organism sequence
  Category: MG81 effectors
  Description: MG81-590 effector
MPTKQKEGGNRCVLTLPLLTEPWQEHIIEKRFKIIEHLKNQLISIELRKLKNLQRTKAYKNLIKQIESVPKSERTVLYKERNKMLKDAGFSQYTFMDDMAGKKSLMQKHFESHINVQIAHKAAIDVWSSFEKFLFGTGQIVHYQKRGTLSSVASKSPKTGMFYYSDENIFKWSGGGTKPKGGIILCLRVASVKTNYEKEMVANNEIKYYRVVRKWMKTKYKYYLQITFAGKPADKHREISTDRVGIDIGTQTIAVASDKSVKLLELADKVNKNHIKKCELQRKLDRSRRYTNPDNFNPDGTVKRGTKGHKLKWNKSKHYLEIAGKIRELERKNADIRKYQHTCLANDILAMGNQIYIEPMNYKGLQKRAKETQVDEKGRYKKKKRFGKSLANKAPAMFVTILKTKAEQHGGEVYEVDIMSYRASQCDHTTGEYTKHGLNDRWRILGNGDKVQRDLYSAFLIKNSNKTHDEIDLDKCSKTYDNFKKLHDKEIENIRNEVILRKRRNISSYGIA

SEQ ID NO: 2311 - protein, 511 aa, Unknown
  Description of Unknown: uncultivated organism sequence
  Category: MG81 effectors
  Description: MG81-591 effector
MKKSNTDTCCLTLPLKLEKWQEDRLAKRFEIARQIYNTMVHAELKKLRNIENSQPYRQIQKQIEALNWKNQNDKARLKSLYNDRNKLLNTIGFSEYGFKADIKYYYKHFNDNIGSSVAVHGIAPQVWAAFEKMLFHKEGKKVHYKKKDDIHSLHGYSVTGKSGGVEIIFRKTYIEWKGLKLPLKFSPDNAYETEMLGRRVKYVRLLRKPGKRKDCWYAQLSLEGKPAIKRDPESGKRRHSIGRGAVGLDIGPQTLAYSACGAADLVELADQVQNIEQMKRRLQRKLDRSRRATNPDNYADNGTIRRGVKLTHNKSNRYRRTQRELRYLQHCQAEIRKRQHIELANHLLALGDCFYVEDMAWPSLTHRAKETAISEKTGRIKRKKRFGKSVANKAPATLIGILEQKCNSLGLPGVMKVPTSLRASQYNHQSGEYTSKPLSQRWNNMPDGERIQRDLYSAFLLQHYDPKAGNFDSALLQQDYPQFVQYHHRAIQRLSTVPKTLSSMGIQRSLR

SEQ ID NO: 2312 - protein, 359 aa, Unknown
  Description of Unknown: uncultivated organism sequence
  Category: MG81 effectors
  Description: MG81-592 effector
MKATKTLQLRIKDKHAKVLVAMAREVNQAWNHVNEVSAKAARPFHGKPKYLSGYDLQKCTAGYSKCDGVSVGSGTVQLVCAEYATRRKQFKKTRLNWRISNPKSSKYSLGWIPFKGGHAKYKAGQIHFAGQKFSLWDSYGLSKYELRGGSFTEDSRGRWYFNVAVEVECQPSPATASVGIDLGLKDCATDSNGKQLHGRWYRNHELALAKAQRANKKKRVKTIHAKIKNQRKDDMHQFSTQLVKNNAAIFVGDVASAKLVKTKMAKSTLDAGWSSLKTMLEYKSHQAGIVFEVVSESYSTQTCSCCGAIPASSPKGRAGLRIREWTCSDCGAEHDRDVNAARNILAAGHRRLAEGIPVL

SEQ ID NO: 2313 - protein, 505 aa, Unknown
  Description of Unknown: uncultivated organism sequence
  Category: MG81 effectors
  Description: MG81-593 effector
MAKATSDTCCLTLPLKLEKWQEDRLAKRLKIARQIYNTLLHFELKKLRRLEASEEYLAIQEKLKEVTDKTERNKLYKQLDKLRRDTGFTEYAFKTDIKEFYKHFSDNIGSAVAVHGIAAQVWVAFDKLFYGSGKAVHFKRHGELNSLRGYSVAGKSGGVEIMFRETYIEWKGLKLPIKLDPNNAYEQEMLQYRIKYCRIIRKPEKSKNHWYVQLSLEGKPVIKCNKETGEILHPVGSGAVGIDIGPQTIAYASESEVALKELADQVNNIEQEKRILQRKLDRSRRATNPDNYNPDGTIKRGVKLTRNKSKRYQKCQRELADIQHRQADIRKRQHNELANHLLSLGNRFYVEDMEWPALTHRAKKTEVSEKTGRFKRKKRFGKSIANKAPATLTNLLDLKLKSRGLGGVVHVDTKVRASQYNHLTDDYHKKELNERWNAMPDGRRIQRDLYSAFLLQHMNEKLDGFDKEALTRDYEQFAALHDDCIDALKKAPKTLASMGIVRRTS

SEQ ID NO: 2314 - protein, 1302 aa, Unknown
  Description of Unknown: uncultivated organism sequence
  Category: MG81 effectors
  Description: MG81-594 effector
MKISKVNHVKTGTRIKENNGEGVLYANPSKQANAVKDLSKHIQDVNKKAQGLYSPLNPVKALINPKMPKEKKDEINGSYKAFKSVVNDIIKENEAGIPDSASVIRALYEKAKKTDLKVSDASNLSSKMIDKCLRKSLESKSEIAKEILRAIISSDKSTVNSLNAEEVKAFFELVHKDYYKIEQLKAIEKSIENKDVKVQVKTGNDGEKHLVLSNADNAKKHFYFDFVKEFAAKDKIEREEMIIRFRQLIILFYSGVESYKLSIGSDVGAWTFGSSLPEVTDNFDDEIASLISEYNNNIANKENIQKSIDLKSNQMKNYKFNSPEYKKLDDQISKLKDDQGDCKYAISDAKRKIKVLVEKLICIKYRDAINAEGITDSDVFWIGYIQQVAQKQFSKKDAYNNYRISTKYLYEVTFNEWISFMASKYIDLGKAVYHFAMPDFSDIKSGKEIYAGKVQPIFENGITSFDYERIKAKETLARDFSVYATYASGIFSNAVTDSDYRLKDEKEDALFYKQEDWEQALLPDAKKKLLMYFGGQSKWEDSEIENVSDLEMTKAFQDMINVIRNSNYHYAGSVLEPNEQSTNIAKMLFDKEFSWLGKIIREKYLSNNVPVYYNVEDINKMMTYLYQGESKREAQIPSFGNVLKKKEMPGFVTKYIPGNLLAKFDSAGVDKFRASLYFVLKEAYYYGFLNETNLKGRFIKALNDSEKNAKNPEAIENFKARINDMDDSCSFGEICQMLMTDYNLQNQSEYKVKSQIEQNQDEKDNKGHKYSHFKMLLYITLQKAFIDYIVEKQDIYGYIKAPIFKSNYFDGDEPQKFVESWEANLFGDVKITTETDPYFLAWYVLSHMLPAKQVNQLQGGIKSYIQFVTDINRREKSVIGTEKDDSLVNSIAYYQNILKVLEFVMCFVGKTSNVLSDYFADEDDYALHLYSYVGFASKKEEKTNSTLSGFCSKSITKAGKELTDRIGIYHDGTNPIVNNNVVKALMYGNENVLSEAVTRVSADLINGEITKYYEVKKKLEKVFEKGECSNEEEQKDLREFQNLKNRIELQDISIFTEIINDYMSELVNMAYLRERDLMYYQLGFNYIRLEYGNVEDKYKELQGDNINIKSGALLYQIVALYTHELPIVYKDKDSYKYTNNGKIGRFVKSYCEEEFSDLDNAYLKGLELFEDINLHDDLHLFRNEIDHLKYFIRADKSILQMYSRIYNGFFSYDLKLKKSVSYIFANILAKYFVIADTEMKSSVENGKRVAMLSIKGLESDVFNYKGKKLDKEGKERDSKYTLPVRSDEFLKEIKKLLNYKSI

SEQ ID NO: 2315 - protein, 512 aa, Unknown
  Description of Unknown: uncultivated organism sequence
  Category: MG81 effectors
  Description: MG81-595 effector
MKKSSTDTCCLTLPLKLEKWQEDRLAKRFEIARQLYNTLVHAELKRLVQIKRTAEYLENEQKIRALDRNNPADRAKLQELYKEQRKSLKTAGFTDYSFTTDMGKYYKHFRDNIGSSVAVHGIAPQVWAAFDKVLFKKGGKKVHYKRPGEVNSVQGYSRTGKSGGREIMFRGAYIEWKGLKLPLKLSPDNAYETDMLQRRLKLVRLVRRPGKRRDRWYAQLVLEGKPAIKADPVTGKAVHPIGSGPVGLDIGPQTLAYSAAGVAGLVELADRVQNIEQEKRCLQRKMDRSRRAANPDNYAEDGTIRRGVKLTHNKSKRYRRSQQELKYLQHRQAEIRKLQHIQLANHLLSLGDHFYVEKMEWSSLTHRAKKTVISEKTGKPRSKKRFGKSIANKTPAMLIEILRQKCKSLGLSDVVEINPADIKASQYNHLTGEYVKKSLSRRWNDMQDGEHLQRDLYSAFLLQHYDSMSKALDLDSLARDYPAFVQYHHREIERLHALPKTPSSMGIRRSIA

SEQ ID NO: 2316 - protein, 355 aa, Unknown
  Description of Unknown: uncultivated organism sequence
  Category: MG81 effectors
  Description: MG81-596 effector
MILVYRYRVKSLNGLLNKQSRAVNFVWNFCNDRQKDALRFGRRWHTGFDLNKLTAGSSKELGLHSGTVNAVCEQYAKSRSQKKRPFLRYRGKRSLGWVPLKGRELKLEGIFFRFACNTFRVFNSRALPEGKIKDGTNFSRDSRGNWFLNIVIDVDVVAPDARAPVRGVGIDLGLKDFATLSTGEKIQAQHIYRGAQQALAVAQRANKKKRVKAIHAQIANRRNDFHHKLSTRIVREFDYIAVGNVNAAGLAKTSMAKSVLDAGWSSFRTQLAYKAVKHGAWFEEVNEAFSTQTCSDCGSMPDSRPKGIAGLGIRSWICSVCGGVHDRDVNAAKNILNKLGSRAGHGTPVVGIPVL

SEQ ID NO: 2317 - protein, 522 aa, Unknown
  Description of Unknown: uncultivated organism sequence
  Category: MG81 effectors
  Description: MG81-597 effector
MKKSSTDTCCLTLPLKLEKWQSDRLEKRFEIGRQIYNTVVRAELKKLQQVERTPQYREIEQKLKKAKQEEAKELWKTRTQLLSKSGFSEYGFKSDMKYYYQHFKENIGSSVAVHGIASQVWTAFEKVLFSKDGKMVHFKKKGELSSLRGYSQAGKSGGIEIIFRGSYVEWKGLKLPLKLSPDNDYETEMLSKRVKYVRILRKEGKTKPHWYAQLVLEGKPAIKRDPASGAPKHPVGHGVVGIDIGTRTLAYSADSKVDLIELADRVQNIEQEKMLLQRKLDRSRRATNPENYKPDGTIKKGVKLTRNKSKRYRKIQHQLAMLQHRQADIRKRQHNELANYLLTLGDCFFVEDMDYRALTRKAKKTEISEKTGRYKRKKRFGKSIANKAPSMLIALLDQKCKSLNLEGVKKVDTAVKASQYNHQTDECKAKELKERWNIMPDGERIQRDLYSAFLLQHCRRDLPEYNRKKLQETFGNELYRVFDREALQRDYPKFVEYHRETIQRLSALPKTIASMGIRRSIS

SEQ ID NO: 2318 - protein, 512 aa, Unknown
  Description of Unknown: uncultivated organism sequence
  Category: MG81 effectors
  Description: MG81-598 effector
MKKSSTDTCCLTLPLKLEKWQEDRLAKRFEIARQLYNTLVHAELKRLVQIKRTAEYRENERKIRTLDWNNPAHRTELEKLYEERRKSLKKAGFTDNSFTTDMGKYYKHFRDNIGSSVAVHGIAPQVWAAFDKLLFKKGGKKVHCKRPGEVNSVQGYSRTGKSGGREIMFRGAYIEWKGLKLPLKLSPDNAYETDMLQRRVKLVRLVRRPGKRRDRWYAQLVLEGKPAIKADPVTGKAVHPIGSGPVGLDIGPQTLAYSAAGVAGLVELADRVQNIEQEKRCLQRKMDRSRRATNPDNYAEDGTIRRGVKLTHNKSKRYRRNQQELKYLQHRQAEIRKLQHIQLANHLLSLGDHFYVEKMEWSSLTRRAKKTVISEKTGKPRSKKRFGKSIANKAPAMLIEILRQKCKSLGLPNVVEINPADIKASQYNHLTGEYVKKSLSRRWNDMQDGEHLQRDLYSAFLLQHYDSMSKALDLDSLARDYPAFVQYHHREIERLHALPKTPASMGIRRSIA

SEQ ID NO: 2319 - protein, 511 aa, Unknown
  Description of Unknown: uncultivated organism sequence
  Category: MG81 effectors
  Description: MG81-599 effector
MGKSSTDTCCLTLPLKLEKWQEDRLAKRFEIARQIYNTMVRAELKKLDRVKQLPEYRKNQKEIQALDWKNSADKQRLKELRANQNRILQKQGFTEYGFKADSKDYYKHFIENIGSSVATHGIAPQVWNAFDKMLFQKDGKVVHFKRYGDVHSLKGGSVAHKSGGAEIMFRKTYIEWKGLKLPLKLSPNNAYEAEMLSYRVKYVRILRTRGKTKDRWYAQLSLEGKPAVKYDSSTGKPVHPVGRGAVGLDIGPQTLAYAAANEANLVELADQVQNIEQEKRRLQRKLDRSRRATNPDNYNENGTIRRGVKLTHNKSKRYCKLQKELSWIQHCQAETRKRQHIALANHLLSLGDCFYVEPMAWPSLTHRAKKTEVSEETGRIKRKKRFGKSVANKAPASLIGILKLKCISLGLTGVVEVPMLLRASQYNHQSKDYAKKSLSQRWNDMPDGNRIQRDLYSAFLLQHYNSQLENFDQETLERDYPQFVRLHNQTIQRLSALPKTPSSMGIRRSVS

SEQ ID NO: 2320 - protein, 512 aa, Unknown
  Description of Unknown: uncultivated organism sequence
  Category: MG81 effectors
  Description: MG81-600 effector
MKKSNTDTCCLTLPLKLEKWQEDRLAKRFEIARQLYNTLVHAELKRLAQVKQTAEYRENERKIRALDWNDPGDQAKLKGLYKERRKSLKTAGFTDYSFTTDMGKYYKHFRDNIGSSVAVHGIAPQVWAAFDKLLFKKGGKKVHYKKPGEVNSVQGYSRTGKSGGTEIMFRGPYIEWKGLKLPLKLSPDNAYETDMLQRRVKLVRLVRRPGKRRDRWYAQLVLEAKPAIKADPVTGKAVHPIGSGPVGLDIGPQTLAYSAAGAAGLVELADRVQNIEQEKRCLQRKMDRSRRAANPDNYAEDGTIRRGVKLTHNKSKRYRRSQQELKYLQHRQAEIRKLQHIQLANHLLSLGDHFYVEKMEWSSLTHRAKKTVISEKTGKPRSKKRFGKSIANKAPAMLIEILRQKCKSLGLPNVVEINPADIKASQYNHLTGEYVKKSLSRRWNEMQDGEHLQRDLYSAFLLQHYDSMSKALDLDSLARDYPAFVQYHHREIERLHALPKTPSSMGIRRSIA

SEQ ID NO: 2321 - protein, 528 aa, Unknown
  Description of Unknown: uncultivated organism sequence
  Category: MG81 effectors
  Description: MG81-601 effector
MRRKNVYNNSNMERRDSCGKSSTDTCCLTLPLKLEKWQEDRLAKRFEIARQIYNTMVRAELKKLERVKQLPEYRKNQKEIQALDGKNSADRARLKELRANQNRILQKQGFTKYGFKSDSKDYYKHFIENIGSSVATHGIAPQVWNAFDKMLFQKDGKVVHFKRHGDVHSLKGGSVTHKSGGAEIMFRKTYIEWKGLKLPLKPSPNNAYEAEMLSYRVKYVRILRTRGKTKDRWYAQLSLEGKPAVKFDSSTGKLVHPVGRGAVGLDIGPQTLAYAAADEANLVELADQVQNIEQEKRRLQRKLDRSRRATNPDNYNENGTIRRGVKLTHNKSKRYCKLQKELSWIQHCQAETRKRQHIALANHLLSLGDCFYVEPMAWPSLTHRSKKTEFSEKTGKIKRKKRFGKSVANKAPASLIGILKLKCISLGLTGVVEVPMLLRASQYNHQSKDYEKKSLSQRWNDMPDGNRIQRDLYSAFLLQHYNSQSESFDQETLERDYPQFVRLHNQTIQRLSALPKTPSSMGIRRSVS

SEQ ID NO: 2322 - protein, 379 aa, Unknown
  Description of Unknown: uncultivated organism sequence
  Category: MG81 effectors
  Description: MG81-602 effector
MLFHKEGKKVHYKKKDDIHSLRGYSVTGKSGGVEIIFRETYIEWKGLKLPLKRSPDNAYETEMLSRRVKYVRLLRKPGKRKDRWYAQLSLEGKPAIKRDPESGELRHAIGRGAVGLDIGPQTLAYSACGAADLVELADQVQNIEQMKRRLQRKLDRSRRATNPNNYADNGTIRRGVKLTHNKSNRYRRTQRELRYLQHRQAEIRKRQHIELANRLLALGNCFYVEDMAWPSLTHRAKETAISEKTGRIKRKKRFGKSVANKAPATLIGILEQKCNSLGLPGVMKVPTSLRASQYNHQSGEYTSKPLSQRWNDMPDGERIQRDLYSAFLLQHYDPQAGNFNSALLQQDYPQFVQYHHRAIQRLSTAPKTLSSMGIQRSLR

SEQ ID NO: 2323 - protein, 512 aa, Unknown
  Description of Unknown: uncultivated organism sequence
  Category: MG81 effectors
  Description: MG81-603 effector
MPTKQKEGGNRCVLTLPLLTEPWQEHIIEKRFKIIEHLKNQLISIELRKLKNLQRTKAYKNLIKQIESVPKSERTVLYKERNKMLKDAGFSQYTFMDDMAGKKSLMQKHFESHINVQIAHKAAIDVWSSFEKFLFGTGQIVHYQKRGTLSSVASKSPKTGMFYYSDENIFKWSGGGTKPKGGIILCLRVASVKTNYEKEMVANNEIKYYRVVRKWMKTKYKYYLQITFAGKPADKHREISTGRVGIDIGTQTIAIASDKSVKLLELADKVNKNNIKKCELQRKLDRSRRYTNPDNFNPDGTVKRGTKGHKLKWNKSKHYIEIAGKIRELERKNADIRKYQHTCLANDILAMGNQIYIEPMNYKGLQKRAKETQVDEKGRYKKKKRFGKSLANKAPAMFVTILKTKAEQHGGEVYEVDIMLYRASQCDHTTGEYTKHGLNDRWRILGNGDKVQRDLYSAFLIKNSNKTHDEIDLDKCSKTYDNFKKLHDKEIENIRNEVKLRERKNISSYGIA

SEQ ID NO: 2324 - protein, 480 aa, Unknown
  Description of Unknown: uncultivated organism sequence
  Category: MG81 effectors
  Description: MG81-604 effector
MAGKSDKACCVLTLPLLTEPWQEHIIEKRFRIMEHLKNSLIALELRKLKNIQRTKQYRQLEAEISNAPKENRKTLYKKRNELLKNAGFSEFAFIDDMTNMQKHFVEHIATQIAHKSASDVWSSFEKVLFNTGRKIHFIRRGSLSSIACKKDGNGMRFRNGMLHWNGGQCKNKVKLELRVACPKTPYECAMLEKKIKYERIIRKWVKTRYKYYVQFTLDGNAVPKPRKMGTGRVGIDIGPSSIAIASSQEVRLMELADKSFSDQTTNPDNFNENKTIRRGVKLSWHYSKHYQKLRGQVRELERKNADIRKYQHTCLANYILSLGTEVYIEQMNFKGLQARAKETTYNKNGRANRKKRFGKSIANRAPAMLVTILETKLKSYAGTELHKVNTWSYRASQYDHITDTYTKKLLRQRWAELGNGDRIQRDLYSAFLLMNSQPSLQSTDRERCSKTYSQFKSLHDQEIYRLQQTPERHLSSFGIA

SEQ ID NO: 2325 - protein, 550 aa, Unknown
  Description of Unknown: uncultivated organism sequence
  Category: MG81 effectors
  Description: MG81-605 effector
MGWKSKGRGGTLVDNEEKKEDGATCCLTLPLKLEKWQSDHLEKRFEIARQLYNTLVHAELKKKCQVERMPEYQEIMKMIDAASNQKEKWALEKKRKAFLEENGFSRNAFKADMEKYYKHFNDNIGANVALHGITAQVWIAFDKVFVDNYKQKGKVHFKKPGELCSVQGYSQKKSGGKEIMFREDRIIWNQQGNRDRKKVKREFLLKLSPDNPYEAEMLKRHVKFVRILRKDGKTKPHWYAQLVLEGKPAVKRDPASGAPKHPIGHGVVGIDIGTRTLAYSTDKEVNLLELADRVQNIEQEKRRLQRKMDRSRRATNPENYNPDGTFKRGVKLTRNKSKRYKRIQHQYAMIQHHQADIRKQQHNELANYLLTLGDCFFVENMSYCDLVHRANKTEISEKTGRYKRKKRFGKSIANKAPAMLITMLKQKCQSRGLEGVKEVDTHVRASQYNHQTDTCIEKALENRWNVMPDGERIQRDLYSAFLLQHCKQGLPEYNRKELKKEFGEELYRVFDREALQRDYPQFVAYHHMTIQRLSELPHTIPSMGIRRIIS

SEQ ID NO: 2326 - protein, 512 aa, Unknown
  Description of Unknown: uncultivated organism sequence
  Category: MG81 effectors
  Description: MG81-606 effector
MPAKQKEGGNRCVLTLPLLTEPWQEHIIEKRFKIIEHLKNQLISIELRKLKNLQRTKAYKNLIKQIESVPKSERTALYKERNKMLKDAGFSQYTFMDDMAGKKSLMQKHFESHINVQIAHKAAIDVWSSFEKFLFGTGQIVHYQKRGTLSSVASKSPKTGMFYYSDENIFKWSGGGTKPKGGIILCLRVAPVKTNYEKEMVANNETKYYRVVRKWMKTKYKYYLQITFAGKPADKHREISTGRVGIDIGTQTIAIASDKSVKLLELADKVNKNHIKKCELQRKLDRSRRYTNPDNFNPDGTVKRGTKGHKLKWNKSKHYIEIAGKIRELERKNADIRKYQHTCLANDILAMGNQIYIEPMNYKGLQKRAKETQVDEKGRYKKKKRFGKSLANKAPAMFVTILKTKVEQHGGEVYEVDIMSYRASKCDHTTGEYTKHGLNDRWRILGNGDKVQRDLYSAFLIKNSNKTHDEIDLDKCSKTYDNFKKLHDKEIENIRNEVKLRERKNISSYGIA

SEQ ID NO: 2327 - protein, 512 aa, Unknown
  Description of Unknown: uncultivated organism sequence
  Category: MG81 effectors
  Description: MG81-607 effector
MKKSSTDTCCLTLPLKLEKWQEDRLAKRFEIARQLYNTLVHAELKRLAQVKQTAEYRENERKIRTLDWNDPGDQAKLKGLYKERRKSLKTAGFTDYSFTTDMGKYYKHFRDNIGSSVAVHGIAPQVWAAFDKLLFKKGGKKVHYKKPGEVNSVQGYSRTGKSGGTEIMFRGPYIEWKGLKLPLKLSPDNAYETDMLQRRVKLVRLVRRPGKRRDRWYAQLVLEGKPAIKADPVTGKAVHPIGSGPVGLDIGPQTLAYSAAGAAGLVELADRVQNIEQEKRCLQRKMGRSRRATNPDNYAEDGTIRRGVKLTHNKSKRYRRSQQELKYLQRRQAEIRKLQHIQLANHLLSLGDHFYVEKMEWSSLTHRAKKTVISEKTGKPRSKKRFGKSIANKAPAMLIEILRQKCKSLGLPNVVEINPADIKASQYNHLTGEYVKKSLSRRWNEMQDGEHLQRDLYSAFLLQHYDSMSKALDLDSLARDYPAFVQYHHQEIERLHALPKTPSSMGIRRSIA

SEQ ID NO: 2328 - protein, 525 aa, Unknown
  Description of Unknown: uncultivated organism sequence
  Category: MG81 effectors
  Description: MG81-608 effector
MAKNNNNTDTCVLTLPLRVEKWQEDCLLKRFEAARRIYNSLLNFELKKLRQLERTVEYRQIQSVISSAYRSNTKDSPECKDAFKRREKLISANGISEYGFKSDVKFFYKHFDGLIGSNVAVHCIAVQLWAAFDKYLRGSGKEIHFKRLGDISSLKGYSVKGKSGGCEIIFRGQYIEWTRKKKKLLLPLKIDPDNEYEREMLSRRVKYVRIIKKPGKNRLRWYAQLTLEGKPALKYSAETGKPIHSVGKGNVGIDIGPQTVAYASDKEVALLELADRVTNIEHQKKKLQRKLDRSRRATNPDNYKPDGTIKRGVKLTRNKSKRYLKLQSKLAYIQHRQAEIRKLQHTCLANHMLTLGDRFFVEKMNWPGLAHRAKETSISEKTGRYKRKKRFGKSLANKAPAMFISILKRKCETLGLPGVVEVDTYSLKASQYNHLSDTYEKKSLSERWNYMPISDGSDSSKTKRIQRDLYSAFLLQHTIPQPCSFDKKALRIDYPNFVTMHDAEIHRLESLPKTITSMGVRRSHS

SEQ ID NO: 2329 - protein, 485 aa, Unknown
  Description of Unknown: uncultivated organism sequence
  Category: MG81 effectors
  Description: MG81-609 effector
MKRFEIARQIYNSLLHAEQKKLRRLEQTPEYREIQRKLQELYREKAEKSRAFREIAKKRTALLKRAGFTEYAFKTDMKAYYKHFKENIGSSVAVHGIASQVWTAFDRKLYGNGKHVHFKRPGEIRSLRGYSAAGKSGGVEILFRGTHIEWKGLCLPLKQKPENAYETEMLSRRVKYVRILRTPGKHRDRWYAQLVLEGRPAVKRNTETGELLHPIGKGPVGIDIGPQTVAYVSQGEASLLELADRVRNIEQEKRKLQRKMDRSRRATNPENYAEDGTIRRGIRLTRNKSGRYRKLQKELAFLQHHQADIRKQQHIALANHLLSLGDRFYVEDMAWPSLTHRAKETVISPKTGRYQRKKRFGKSVANKAPAMFLGILTQKCVSLGLPGVVKVSTSVRASQYNHLTETYQKKPLSQRWNVMPDGRKIQRDLYSAFLLQHMTPQLDGFDPDGLRQDYESFAVLHEEAIHKLRLVPRTLTSMGLQRKCS

SEQ ID NO: 2330 - protein, 531 aa, Unknown
  Description of Unknown: uncultivated organism sequence
  Category: MG81 effectors
  Description: MG81-610 effector
MILLAKNNNNNNNTDTCVLTLPLRVEKWQEDCLLKRFEAARRIYNSLLNFELKKLRQLERTVEYRQIQSVISSAYRSNTKDSPECKDAFKRREKLISVNGISENGFKSDVKFFYKHFDGLIGSNVAVHCIAVQLWAAFDKYLSGSGKEIHFKRLGDISSLKGYSVKGKSGGCEIIFRGQYVEWTRKKKKLLLPLKIDPDNEYEREMLSRRVKYVRIIKKPGKNRLRWYAQLTLEGKPALKYSAGTGKPIHSVGKGNVGIDIGPQTVAYASDKEVALLELADRVTNIEHQKKKLQRKLDRSRRATNPDNYKPDGTIKRGVKLTRNKSKRYLKLQSKLAYIQHRQAEIRKLQHTCLANHMLTLGDRFFVEKMNWPGLAHRAKETSISEKTGRYKRKKRFGKSLANKAPAMFISILKRKCETLGLPGVVEVDTYSLRASQYNHLSDTYEKKSLSERWNYMPISDGSDSSKTKRIQRDLYSAFLLQHTIPQPCSFDKKALRIDYPNFVTMHDAEIHRLESLPKTITSMGVRRSHS

SEQ ID NO: 2331 - protein, 512 aa, Unknown
  Description of Unknown: uncultivated organism sequence
  Category: MG81 effectors
  Description: MG81-611 effector
MKKSSTDTCCLTLPLKLEKWQEDRLAKRFEIARQLYNTLVHAELKRLAQVKQTAEYRENERKIRALDWNDPGDQTKLKGLYKERRKSLKTAGFTDYSFTTDMGKYYKHFRDNIGSSVAVHGIAPQVWAAFDKLLFKKGGKKVHYKKPGEVNSVQGYSRTGKSGGTEIMFRGPYIEWKGLKLPLKLSPDNAYETDMLQRRVKLVRLVRRPGKRRERWYAQLVLEGKPAIKADPVTGKAVHPIGSGPVGLDIGPQTLAYSAAGVAGLVELADRVQNIEQEKRCLQRKMGRSRRATNPDNYAEDGTIRRGVKLTHNKSKRYRRSQQELKYLQHRQAEIRKLQHIQLANHLLSLGDHFYVEKMEWSSLTHRAKKTVISEKTGKPRSKKRFGKSIANKAPAMLIEILRQKCKSLGLPNVVEINPADIKASQYNHLTGEYVKKSLSRRWNEMQDGEHLQRDLYSAFLLQHYDSMSKALDLDSLARDYPAFVQYHHREIERLHALLKTPASMGIRRSIA

SEQ ID NO: 2332 - protein, 511 aa, Unknown
  Description of Unknown: uncultivated organism sequence
  Category: MG81 effectors
  Description: MG81-612 effector
MGKSSTDTCCLTLPLKLEKWQEDRLAKRFEIARQIYNTMVRAELKKLDRVKQLPEYRKNQKEIQALDWKNSADKQRLKELYGNQRKILQKQGFTEYGFKSDSKDYYKHFIENIGSSVATHGIAPQVWNAFDKMLFQKDGKVVHFKRYGDVHSLKGGSVTNKSGGAEIMFRKTYIEWKGLKLPLKLSPNNAYEAEMLSYRVKYVRILRTRGKTKDRWYAQLSLEGKPAVKYDSSTGKPVHPVGRGAVGLDIGPQTLAYAAANEANLVELADQVQNIEQEKRRLQRKLDRSRRATNPDNYNENGTIRRGVKLTHNKSKRYCKLQKELSWIQHCQAETRKRQHIALANHLLSLGDCFYVEPMAWPSLTHRAKKTEVSEETGRIKRKKRFGKSVANKAPASLIGILKLKCISLGLTGVVEVPMLLRASQYNHQSKDYAKKSLSQRWNDMPDGNRIQRDLYSAFLLQHYDSQSESFDQETLERDYPQFVRLHNQTIQRLSALPKTPSSMGIRRSVS

SEQ ID NO: 2333 - protein, 512 aa, Unknown
  Description of Unknown: uncultivated organism sequence
  Category: MG81 effectors
  Description: MG81-613 effector
MPTKQKEDSNRCVLTLPLLTEPWQEHIIEKRFKIIEHLKNQLISIELRKLKNLQRTKAYKNLIKQIESVPKSERTALYKERNKMLKDTGFSQYTFMDDMAGKKSLMQKHFESHINVQIAHKAAIDVWSSFEKFLFGTGQIVHYQKRGTLSSVASKSPKTGMFYYSDENIFKWSGGGTKPKGGIILCLRVASVKTNYEKEMVANNEIKYYRVVRKWMKTKYKYYLQITFAGKPADKHREISTGRVGIDIGTQTIAIASDKSVKLLELADKVNKNHIKKCELQRKLDRSRRYTNPDNFNPDGTVKRGTKGHKLKWNKSKHYIEIAGKIRELERKNADIRKYQHTCLANDILAMGNQIYIEPMNYKGLQKKAKETQVDEKGRYKKKKRFGKSLANKAPAMFVTILKTKAEQHGGEVYEVDIMSYRASQCDHTTGEYTKHGLNDRWRILGNGDKVQRDLYSAFLIKNSNKTHDEIDLDKCSKTYDNFKKLHDKEIENIRNEVILRKRRNISSYGIA

SEQ ID NO: 2334 - protein, 528 aa, Unknown
  Description of Unknown: uncultivated organism sequence
  Category: MG81 effectors
  Description: MG81-614 effector
MILLANNNNNTDTCVLTLPLRVEKWQEDCLLKRFEAARRIYNSLLNFELKKLRQLERTVEYRQIQSVISSAYRSNTKDSPECKAALKRREKLIDENGLTKNGFKNDVKFFYKHFDGLIGSSVAVHCIAVQLWAAFNKYLCGNGKEIHFKRLGDISSLKGYSVKGKSGGCEIIFRGQYVEWTRKKKKLLLPLKIDPDNEYEREMLSRRVKYVRIIKKPGKNRLRWYAQLTLEGKPALKYSAETGKPIHSVGKGDVGIDIGPQTVAYASDKEVALLELADRVTNIEHQKKKLQRKLDRSRRATNPDNYKPDGTIKRGVKLTRNKSKRYLKLQSKLAYIQHRQAEIRKLQHTCLANHMLTLGDRFFVEKMNWPGLAHRAKETSISEKTGRYKRKKRFGKSLANKAPAMFISILKQKCETLGLPGVVEVDTFRLKASQYNHLSDTCEKKSLSERWNYMPISDGSDSSKTKRIQRDLYSAFLLQHTIPQSCSFDKEALRIDYPNFVTMHDAEIHRLESLPKTITSMGVRRSHS

SEQ ID NO: 2335 - protein, 528 aa, Unknown
  Description of Unknown: uncultivated organism sequence
  Category: MG81 effectors
  Description: MG81-615 effector
MAKNNNNNNDTDTCVLTLPLRVEKWQEDCLLKRFEAARRIYNSLLNFELKKLRQLERTVEYRQIQSVISSAYRSNTKDSLECKDAFKHREKLISANGISKNGFKSDVKFFYKHFDGLIGSSVAVHCIAVQLWAAFDKYLSGSGKEIHFKRLGDISSLKGYSVKGKSGGREIIFRGQYIEWTRKKKKLLLPLKIDPDNEYEREMLSRRVKYVRIIKKPGKNRLRWYAQLTLEGKPALKYSAGTGKPIHSVGKGDVGIDIGPQTVAYASDKEVALLELADRVTNIEHQKKKLQRKLDRSRRATNPDNYKPDGTIKRGVKLTRNKSKRYLKLQSKLAYIQHRQAEIRKLQHTCLANHMLTLGDRFFVEKMNWPGLAHRAKETSISEKTGRYKRKKRFGKSLANKAPAMFISILKRKCETLGLPGVVEVDTYSLKASQYNHLSDTYEKKSLSERWNYMPISDGSDSSKTKRIQRDLYSAFLLQHTIPQPCSFDKEALRIDYPNFVTMHDAEIHRLESLPKTITSMGVRRSHS

SEQ ID NO: 2336 - protein, 534 aa, Unknown
  Description of Unknown: uncultivated organism sequence
  Category: MG81 effectors
  Description: MG81-616 effector
MILLANNNNNNNNNNNTDTCVLTLPLRVEKWQEDCLLKRFEAARRIYNSLLNFELKKLRQLERTVEYRQIQSVISSAYRSNTKDSPECKDAFKRREKLISANGISEYGFKSDVKFFYKHFDGLIGSSVAVHCIAVQLWAAFDKYLRGSGKEIHFKRLGEISSLKGYSVKGKSGGLEIIFRGQYIEWTRKKKKLLLPLKIDPDNEYEREMLSRRVKYVRIIKKPGKNRLRWYAQLTLEGKPALKYSAETGKPIHSVGKGNVGIDIGPQTVAYASDKEVALLELADRVTNIEHQKKKLQRKLDRSRRATNPDNYKPDGTIKRGVKLTRNKSKRYLKLQSKLAYIQHRQAEIRKLQHTCLANHMLTLGDRFFVEKMNWPGLAHRAKETSISEKTGRYKRKKRFGKSLANKAPAMFISILKRKCETLGLPGVVEVDTYNLKASQYNHLSDTYEKKSLSERWNYMPISDGSDSSKTKRIQRDLYSAFLLQHTIPQPCSFDKEALRIDYPNFVTMHDAEIHRLESLPKTVTSMGVRRSHS

SEQ ID NO: 2337 - protein, 542 aa, Unknown
  Description of Unknown: uncultivated organism sequence
  Category: MG81 effectors
  Description: MG81-617 effector
MPKRAEGPRCVLTMPLLTEPWQEHILETRFRIILHLKNQLVRMEWRKYKDLCRTKEFRQLEEQIEATPKEERRPLHKKRRELLKAAGLSEYRFKADISDMQKQFSRHIAVKIAENAASDVWRAFDTYLFKKGQEVHTHSLSMMRSVAGQAGNGMHYIKVTKKGKDYYFFKWNVEKEKEEPTDQKKRPSKKQTRRERIRGKKSIPLKISITPPRNAYEREMLEKPVKYLRVVRRWIKSRYKYYLQFTLEGHPVPKPKERGTGRVGIDIGTRTIAVVSGNEVHLEELVEVTDRDHRRSVDQCQRRKAALRRKMDRSSRIMNPQNFKPDGSVKPRKELTPWKRSNRYKRLAGKVRELERKNADVRKYEHSRLADRILAMGDEIFLESMNFSALQRRKKKTEKDKKGRYAKKKRFGKSIAHRAPATLVSTLERKAAQRHQTVVRVKTETFRASQLDHTTGEYRKTHLSERRKTLSNGDEVQRDLYAAFLLMNSASTWDEKKKEEVWDHSDLDACRESYGTFKVLHDAEILRIANDGRQHPSSFGIA

SEQ ID NO: 2338 - protein, 511 aa, Unknown
  Description of Unknown: uncultivated organism sequence
  Category: MG81 effectors
  Description: MG81-618 effector
MAKCSTDTCCLTLPLRLEKWQEDRLAKRFEIARQIYNTMVRAELKKLRAMEQSEPYKANQEKIQALDWKTQTDKQALKALYKERDKLLRDGGFSEYGFKSDIKNYYKHFNNNIGSNVAFHGIAPQVWAAFEKMLFKKEGKKVHFKKKGDIHSLRGYSAAGKSGGVEIIFRETYIEWKGLKLPLKLSPDNIYETQMLSYRVKYVRLLRKPGKRKDRWYAQLSLEGKPVIKYNPKTGEVRHPIGKGAVGLDIGPQTLAYSAATGADLVELANQVQNVEQEKRRLQRKLDRSRRATNPGNYADDGTIRRGIALTHNKSKRYLRTQQELKYLQHQQAEIRKRQHTELANHLLSLGDCFYVEKMVWTSLTHRAKETEISEKTGKIKRKKRFGKAVANKAPATLIGILQRKSAALGIPGVIEVPTSVKASQYNHQSGTYTPKPLSQRWNNMPDGERIQRDLYSAFLLQHYDPQTNTFDANSLHQDYPQFVQYHHDAVLRLYAMPKTPSSMGIKRSLR

SEQ ID NO: 2339 - protein, 538 aa, Unknown
  Description of Unknown: uncultivated organism sequence
  Category: MG81 effectors
  Description: MG81-619 effector
MDNEEKKEDGATCCLTLPLKLEKWQSDHLEKRFEIARQLYNTLVHAELKKKCQVERMPEYQEIMKMIDAASNQKEKWALEKKRKAFLEENGFSRNAFKADMEKYYKHFNDNIGANVALHGITAQVWIAFDKVFVDNYKQKGKVHFKKPGELCSVQGYSQKKSGGKEIMFREDRIIWNQQGNRDRKKVKREFLLKLSPDNPYEAEMLKRHVKFVRILRKDGKTKPHWYAQLVLEGKPAVKRDPASGAPKHPIGHGVVGIDIGTRTLAYSTDKEVNLLELADRVQNIEQEKRRLQRKMDRSRRAMNPENYNSDGTFKRGVKLTRNKSKRYRRIQHQLAMIQHHQADIRKQQHNELANYLLTLGDCFFVENMSYCDLVHRANKTEISEKTGRYKRKKRFGKSIANKAPAMLITMLKQKCQSRGLEGVKEVDTHVRASQYNHQTDTCIEKALENRWNVMPDGERIQRDLYSAFLLQHCKQGLPEYNRKELKKEFGEELYRVFDREALQRDYPQFVAYHHMTIQRLSELPHTIASMGIRRSIS

SEQ ID NO: 2340 - protein, 512 aa, Unknown
  Description of Unknown: uncultivated organism sequence
  Category: MG81 effectors
  Description: MG81-620 effector
MKKSSTDTCCLTLPLKLEKWQEDRLAKRFEIARQLYNTLVHAELKRLAQVKQTAEYRENERKIRALDWNDPGDQTKLKGLYKERRKSLKTAGFTDYSFTTDMGKYYKHFRDNIGSSVAVHGIAPQVWAAFDKLLFKKGGKKVHYKKPGEVNSVQGYSRTGKSGGTEIMFRGPYIEWKGLKLPLKLSPDNAYETDMLQRRVKLVRLVRRPGKRRDRWYAQLVLEGKPAIKADPVTGKAVHPIGSGPVGLDIGPQTLAYSAAGAAGLVELADRVQNIEQEKHCLQRKMDRSRRATNPDNYAEDGTIRRGVKLTHNKSKRYRRSQQELKYLQRRQAEIRKLQHIQLANHLLSLGDHFYVEKMEWSSLTHRAKKTVISEKTGKPRSKKRFGKSIANKAPAMLIEILRQKCKSLGLPNVVEINPADIKASQYNHLTGEYVKKSLSRRWNEMQDGEHLQRDLYSAFLLQHYDSMSKALDLDSLARDYPAFVQYHHREIERLHALPKTPASMGIRRSIA

SEQ ID NO: 2341 - protein, 523 aa, Unknown
  Description of Unknown: uncultivated organism sequence
  Category: MG81 effectors
  Description: MG81-621 effector
MILLAKNNNNNTDTCVLTLPLRVEKWQEDCLLKRFEAARRIYNSLLNFELKKLRQLERTVEYRQIQSVISSAYRSNTKDSPECKDAFKRREKLIDENGLTKNGFKNDVKFFYKHFDGLIGSSVAVHCIAVQLWAAFNKYLCGNGKEIHFKRLGDISSLKGYSVKGKSGGCEIIFRGQYVEWTRKKKKLLLPLKIDPDNEYEREMLSRRVKKPGKNRLRWYAQLTLEGKPALKYSAETGKPIHSVGKGDVGIDIGPQTVAYASDKEVALLELADRVTNIEHQKKKLQRKLDRSRRATNPDNYKPDGTIKRGVKLTRNKSKRYLKLQSKLAYIQHRQAEIRKLQHTCLANHMLTLGDRFFVEKMNWPGLAHRAKETSISEKTGRYKRKKRFGKSLANKAPAMFISILKRKCETLGLPGVVEVDTYSLKASQYNHLSDTCEKKSLSERWNYMPISDGSDSSKTKRIQRDLYSAFLLQHTIPQPCSFDKEALRIDYPNFVIMHDAEIHRLESLPKTITSMGVRRSHS

SEQ ID NO: 2342 - protein, 510 aa, Unknown
  Description of Unknown: uncultivated organism sequence
  Category: MG81 effectors
  Description: MG81-622 effector
MAKATTDTCCLTLPLVLEKWQSDRLAKRFELARQIYNTLLNYELKKLRRLEKTEEYAAGQAKLKELNDRQERDEAARKECHRQLNELRKAAGFSEYDFKTDVKPFYKHFGDNVGSSVAVHGIASQVWQAFERLFYGNGKAVHFKKRGEIRSLRGYSVSGKSGGVEIMFRGSYIEWKGLRLPIKLDADNAYEAEMLQKRVKYCRIVRKEGRRKTRWYVQLMLEGKPALKCDPDTGALRHPTGSGPVGIDIGPQTVAYAAETEAVLQELADGVKDIEREKRTVQRKLDRSRRATNPECFAADGTIKRGVKLNWRKSKRYLALQRELASLQRQQAEIRKRQHTELANHLLSLGDRFYVEDMAWPALTHRAKETAISEKTGRYKRKKRFGKSVGNKAPAMLIGILDQKLRSRGMGGVVKVPTTVRASQFNHVTGEYQKKPLSQRWNEMPDGRRIQRDLYSAFLLQHVNEAQDGFDVAALIRDYENFVTLHDRMIETLKTAPKTLTSMGIWRTAS

SEQ ID NO: 2343 - protein, 495 aa, Unknown
  Description of Unknown: uncultivated organism sequence
  Category: MG81 effectors
  Description: MG81-623 effector
MPNTDSNRCILTLPLMTEPWQEHLIETRFDIMEHLKNSLIALELRKLKNLQRTRAYKELEKKIFEKPKEERKPLYKERSAMLRTAGFSEFDFINDMTPMQKHFADHIAAQISHRSASDVWRAFESYLFSSGREVHFQKRGTLDSVACKKAGNGMNYRNDTFEWSGGRTPNAKRLCIRVEKPQTEYEKHMLEKEVKNMRIIRKWMKTRYKYYLQLTLVGDPYQKPRKIGEGRVGIDIGTRTIAIASETTVRLLELADRIDGNHKRKCELQRKMDASKRATNPDNFNSDGTIRRRSKGKKMTWHFSKHYLRMRDQVRELERKNADIRTYQHNCLANEVLTLGTDVFVEPMSYKGLQHRAKETKVDEKGRYLKKKRFGKSLANKAPSKFLMILENKLACKGKALNYVDINRFRASQFDHTNGTYRKKQLSERFATLSTGEHVQRDMYSAFLLMNSNDSLNAPDIERCGQTFERFKELHAIEVERIRQSPYRRIQSFGI

SEQ ID NO: 2344 - protein, 522 aa, Unknown
  Description of Unknown: uncultivated organism sequence
  Category: MG81 effectors
  Description: MG81-624 effector
MKKSSTDTCCLTLPLKLEKWQSDRLEKRFEIGRQIYNTVVRAELKKLHQVERTPQYREIEQKLKEAKQEEAKELWKKRTQLLSKSGFSEYGFKSDMKYYYQHFKENIGSSVAVHGIASQVWTAFEKVLFSKDGKMVHFKKKGELSSLRGYSQAGKSGGIEIIFRGSYVEWKGLKLPLKLSSNNDYETEMLSKRVKYVRILRKEGKTKPHWYAQLVLEGKPAIKRDPASGAPKHPVGHGVVGIDIGTRTLAYSADSKVDLIELADRVQNIELEKMLLQRKLDRSRRATNPENYKPDGTIKKGVKLTRNKSKRYRKIQHQLAMLQHRQADIRKRQHNELANYLLTLGDCFFVEDMDYRALTRKAKKTEISEKTGRYKRKKRFGKSVANKAPSMLIALLDQKCKSLNLEGVKKVDTAVKASQYNHQTDECKAKELKERWNIMPDGERIQRDLYSAFLLQHCKRGLPEYNRKKLQEAFGNELYRVFDREALQRDYPKFVEYHRETIQRLSALPKTIPSMGIRRIIS

SEQ ID NO: 2345 - protein, 496 aa, Unknown
  Description of Unknown: uncultivated organism sequence
  Category: MG81 effectors
  Description: MG81-625 effector
MAKNEQNCCVLTLPLLTEPWQEHIIETRFRIMEQLKNALIAKELGKLNNLKRTREWKRLMKSIQDAKDEKEKKQLFKKRTELLRNVGFSDFSFSNDVTNLKIHKHFAEHINSGIAQRAGKDVWRAFEKYLFSDGKTVHFHRRGTLDSVANRYAREGMMIDGDILTWKGGQSDHQIVLKIRIRRLKNAYEREMLQKTVRNLRIVRKWMKTRYKYYLQITLQGDPASKYRSVGKGRIGIDIGTQTIAWSSPTEVRLAELAAGIKRNHAEKTALQRKMDRSRRTANPQNYNPDGTIRRGVKLRWVKTKHYLRMEGRVRELERKNADIRKYEHICMANHILSLGNEVYIEDMSFKGLQGRAKETKLDKNGRFARKKRFGKSLANRAPSMFVTILENKLKASGGSLHKVNTRTFRASQYDHTADEFKKKTLGQRWNHLKNGDKIQRDLYSAFLLMNAAPSLEEPDKKLCGKTYPQFNRLHDAEMERLRAEEKPHLSSMGIH

SEQ ID NO: 2346 - protein, 540 aa, Unknown
  Description of Unknown: uncultivated organism sequence
  Category: MG81 effectors
  Description: MG81-626 effector
MATTDKKDEENLRAYKFRLDPNQAQTTALYQAVGAARYTYNMLTAYNLEVNRLRDDYWKRRHDEGISDADIKKELNALAKEDKRYKQLNYGAFGTQYLTPEKKRHEQAEHRIENGEDPSVVWNQETERSANPWLHTANQRVLVSGLQNASDAWDNFWASRTGKRAGRLVGTPRFKKKGISRDSFTVPAPEKMGAYGTAYLRGEPAYKQGRRKITDYRHVRLSYLGTIRTFNSTKPLVKAVAAGAKIRRYTVSRNADRWYVSFLVKFSEPIRRSATKRARAAGSVGVDLGVKYLASLSDSEAPQRFPNLKFVEGLPSLENPRWSEASSRRLHKLQRALARSQKGSNRRSRLVKQIARLHHMTALRRESNLHQLTKKLATEYTLVGFEDLNVSGMTASAKGTVENPGKNVAQKSGLNRVVLDAAFGVFRNQLEYKAVWYGSAFEKVDRYFASSQTCSECGRKAKTKLTLRDRVFDCAYCGNMMDRDLNAAVNICREAQRLFDEKLASEDGESLNGRGSRGALRGAETVEASRPPASHRRGSP

SEQ ID NO: 2347 - protein, 509 aa, Unknown
  Description of Unknown: uncultivated organism sequence
  Category: MG81 effectors
  Description: MG81-627 effector
MARCTTPTCVLTLPLRLEKWQEDRLAKRFEIARKIYNTFLGVKLKELRRLEQTPEYRAIKKELAALYSEKEKNADRIRALYEERNALLKNFTEFKFKKDIKFYYKHFNSNIASKVATHCIASQVWSAFEKYLFGNGKRIHFKRPGEIYSLRGFSATNARSGGSEIIYRGDHIEWNKLRLPLKLDPGNQYEEEMLTNRVKYVRILRRPGKNRDHWYAQLTLEGLPSIKRDDETGDPVHPIGNGPVGIDIGPQTIAYSSAKEAGLLELADRVQNIEDKKCRIQRKMDRSRRATNPGNYNPDGTIKRGVPLTRNKSKRYLRLQKELAWIQHQQAAIRKEQHVALANYLLTLGDRFYIEDMNWQGLARRAKGTAVPEEEKPHKRKKRFGKSIANKAPAALVTILKNKCTSLGLPGVIPINTKVRASQYNHLTDSYQKKELSQRWNEMPDGRKIQRDLYSAFLLQHMNSQLDGFDRAALQRDYESFVSLHDQAILRAAAAPKLISSMGVKRTAN

SEQ ID NO: 2348 - protein, 530 aa, Unknown
  Description of Unknown: uncultivated organism sequence
  Category: MG81 effectors
  Description: MG81-628 effector
MILLAKNNNNNNTDTCVLTLPLRVEKWQEDCLLKRFEAARRIYNSLLNFELKKLRQLERTVEYRQIQSVISSAYRSNTKDSPECKDAFKRREKLISANGISENGFKSDVKFFYKHFDGLIGSNVAVHCIAVQLWAAFDKYLSGSGKEIHFKRLGDISSLKGYSVKGKSGGREIIFRGPYIEWTRKKKKLLLPLKIDPDNEYEREMLSRRVKYVRIIKKPGKNRLRWYAQLTLEGKPALKYSAETGKPIHSVGKGNVGIDIGPQTVAYASDKEVALLELADRVTNIEHQKKKLQRKLDRSRRATNPDNYKPDGTIKCGVKLTRNKSKRYLKLQSKLAYIQHRQAEIRKLQHTCLANHMLTLGDRFFVEKMNWPGLAHRAKETSISEKTGRYKRKKRFGKSLANKAPAMFISILKRKCETLGLPGVVEVDTFRLRASQYNHLSDTYEKKSLSERWNYMPISDGSDSSKTKRIQRDLYSAFLLQHTIPQPCSFDKEALRIDYPNFVIMHDAEIHRLESLPKTITSMGVRRSHS

SEQ ID NO: 2349 - protein, 1387 aa, Unknown
  Description of Unknown: uncultivated organism sequence
  Category: MG81 effectors
  Description: MG81-630 effector
MKLTKVEKARIAVSREKKDSGRIILYTNPEDVKKTSVTTMEQQVSKRIDQANKLYQVFFKSVIPVELNKHFAEISKIAAKCRNTEEFYKKACGYSGYEWTDAKQKKRTSQISRFSYTSSGKNMYVVMDNFVKEYMVQIWQEKDFRNAAVKILCCICDGKKFASKLEKVKKESPDTLKKFIEISGKCEGNPFVDYDTSFLEKVFTLVISQMVKNCDRKSYEQDDKEKIKKSIQKEIQWLSHVQSVTERSFGREGKTYLLFKIRNPYATEERLQTVLIRMRKTLKRGRNRDIAIVLLQGLAQMNQVTFTDTVKHLYQEEEKAFCDFIDAVNRDYYRVNIVKSVRNMDVKVQPDLNDNSILKLSGLGNIKKEALSDTLLRYAASADESDQVLLDIKKLLFEYFLPENSKETSKYTTVQNLWNIPYLPKIFFDYGFENEDSDDDNECAEDIETLCDVEPQYKINQHSLKRRIRYVNYGKYLQMTKNESDRERRYWIHYIKEFVEKNYVDSGRTLSEKNCYASSMMLNCWKEIIRYLCGKYIDIGKAVFHFTNLTAMPKPKDKIIYGQLEEQYKKGISSFDYEAIKAEETLQRDIVQSVVAAAFAFSKSVIDETKMEECQETNKEDILFLSENVLGSLLKENTIKLILRFYGGESSVAQKEYFDQQEIVQEMISHLKSIRNENFHYLDGAKKDNPHKYASILWKNDEMAYQKLTKQRYYANNVGLFYRAEEIQELVQELYSQKNITEAQIPAFRTVLKRKDLPGYMEELGILFPDNTQEKSKGDFEGTLYFLMKEIYYRDFIVKDKAAAYFFKAVDQNKEQSKKEDKHTERAAENFHRYVKSLEKKYNKKEISFGTVCQYIMMEYNQQNTTKQETEIYKHFKMLISLCIRKAFGNYIKETYRFLFHPIYSKQQGEPEYLDTLELESGVKEKNYEWFTLAHFLHPVQLNHLVGDLKSYIQYREDILRRIVFAEQRVYADQQKEVQQKVKTAKEILEVLEFVRKVSGRVSNEYTDYYENEEEYAEFLYQYIDFRKREGKSAFESLKYFCQNILDSGTVVDLYADTENPKVLRNIELTRMYAGSNVKIPEYEKITEDEIKMYYQEKNSVALILSRGLCRNEKEQKKVIEFNWKKKRLTLNEITDVFSLVNDLLGKMISFSYLRERDQMYLLLGFYYMALCAENKSENHLGWKGETLDKLESSDSKFDIGGGLVLYQIVSAFNFGSKLLYISEDGRWKMAGGAFPGKYGRFENDYNHRTSLSKVIRLFENESYEREIIYWRDYVDHMKYYVNQNQSIMEIYSAFYSKVLGYSAKLRKSVVFNLQAALEKHHINPECIWMTSDGKCADIKLMKNLESQKFTYKLAKREGEKTERKICMNALNENFLKTIRTSLEYKK

SEQ ID NO: 2350 - protein, 505 aa, Unknown
  Description of Unknown: uncultivated organism sequence
  Category: MG81 effectors
  Description: MG81-631 effector
MARAQTDTCCLTLPLKLEKWQSDRLDKRLEIARQIYNTLLRFELKKLLRLEESKEYTDIQNSLKEITDNTERNKLYKQIDKLRQKAGFSEYAFKTDIKEFYKHFSDNIGSSVAVHGIAAQVWTAFDRLFYGNGKAVYYKRRGELNSVRGYSVAGKSGGIEIIFRGNYIEWKGLKLPIKLDLTNTYENEMLQRRVKYCRLLKKPGRTKERWYVQLMLEGKPAIKVDKNTGELRHPVGRGAVGIDIGPQTIAYVSDSEIDLKELADQVNNIEREKRVLQRKLDRSRRATNPDNYAPDGTIKRGVKLSHNKSKRYIKTQRELAALQRQQADIRKRQHNELANHLLSLGDCFYIEKMEWPALTHRAKQTEISEKTGKDKRKKRFGKSVGNKAPATLTGLLDQKLKSRGLSGIIEVDTKVRASQYNHLTDDYHKKELSERWNFMPDGRRIQRDLYSAFLLQHMNEQQDGFDKTALQRDYERFVIQHDQCIEELKRAPKTLASMGIVRRAS

SEQ ID NO: 2351 - protein, 521 aa, Unknown
  Description of Unknown: uncultivated organism sequence
  Category: MG81 effectors
  Description: MG81-632 effector
MMATWKGGIPVGKSSTDTCCLTLPLKLEKWQEDRLAKRFEIARQIYNTMVRAELKKMDRVKQLPEYRKNQKEIQALDWKNSADKQRLKELYGNQNRILQKQGFTKYGFKSDSKDYYKHFIENIGSSVATHCIAPQVWNAFDKMLFQKDGKVVHFKRYGDVHSLKGGSVTNKSGGAEIMFRKTYIEWKGLKLPLKLSPNNAYEAEMLSYRVKYVRILRTRGKTKDRWYAQLSLEGKPAVKYDSSTGKPVHPVGRGAVGLDIGPQTLAYAAANEANLVELADQVQNIEQEKRRLQRKLDRSRRATNPDNYNENGTIRRGVKLTHNKSKRYCKLQKELSWIQHCQAETRKRQHIALANHLLSLGDCFYVEPMAWPSLTHRAKNTEVSEKTGRIKRKKRFGKSVANKAPASLIGILKLKCISLGLTGVVEVPMLLKASQYNHQSKDYAPKSLSQRWNDMPDGNRIQRDLYSAFLLQHYNSQLENFNQETLERDYPQFVRLHNQTIQRLSALPKTPSSMGIRRSVS

SEQ ID NO: 2352 - protein, 530 aa, Unknown
  Description of Unknown: uncultivated organism sequence
  Category: MG81 effectors
  Description: MG81-633 effector
MILLAKNNNNNNTDTCVLTLPLRVEKWQEDCLLKRFEAARRIYNSLLNFELKKLRQLERTVEYRQIQSVISSAYRSNTKDSPECKDAFKRREKLISANGISKNGFKSDVKFFYKHFDGLIGSSVAVHCIAVQLWAAFDKYLSGSGKEIHFKRLGDISSLKGYSVKGKSGGCEIIFRGQYVEWTRKKKKLLLPLKIDPDNEYEREMLSRRVKYVRIIKKPGKNRLRWYAQLTLEGKPALKYSAETGKPIHSVGKGNVGIDIGPQTVAYASDKEVALLELADRVTNIEHQKKKLQRKLDRSRRATNPDNYKPDGTIKRGVKLTRNKSKRYLKLQSKLAYIQHRQAEIRKLQHTCLANHMLTLGDRFFVEKMNWPGLAHRAKETSISEKTGRYKRKKRFGKSLANKAPAMFISILKRKCETLGLPGVVEVDTYNLKASQYNHLSDTCEKKSLSERWNYMPISDGSDSSKTKRIQRDLYSAFLLQHTIPQPCSFDKEALRIDYPNFVTMHDAEIHRLGSLPKTITSMGVRRSHS

SEQ ID NO: 2353 - protein, 511 aa, Unknown
  Description of Unknown: uncultivated organism sequence
  Category: MG81 effectors
  Description: MG81-634 effector
MKKSNTDTCCLTLPLKLEKWQEDRLAKRFEIARQIYNTMVHAELKKLRNIENSQPYRQIQKQIEALNWKNQNDKARLKSLYNDRNKLLNTIGFSEYGFKADIKYYYKHFNDNIGSSVAVHGIAPQVWAAFEKMLFHKEGKKVHYKKKDDIHSLHGYSVTGKSGGVEIIFRKTYIEWKGLKLPLKRSPDNAYETEMLGRRVKYVRLLRKPGKRKDCWYAQLSLEGKPAIKRDPESGKRRHSIGRGAVGLDIGPQTLAYSACGAADLVELADQVQNIEQMKRRLQRKLDRSRRATNPDNYADNGTIRRGVKLTHNKSNRYRRTQRELRYLQHCQAEIRKRQHIELANHLLALGDCFYVEDMAWPSLTHRAKETAISEKTGRIKRKKRFGKSVANKAPATLIGILEQKCNSLGLPGVVKVPTSLRASQYNHQSGEYTSKPLSQRWNNMPDGERIQRDLYSAFLLQHYDSKAGNFDSALLQQDYPQFVQYHHRAIQRLSTVPKTLSSMGIQRSLR

SEQ ID NO: 2354 - protein, 511 aa, Unknown
  Description of Unknown: uncultivated organism sequence
  Category: MG81 effectors
  Description: MG81-635 effector
MKKSNTDTCCLTLPLKLEKWQEDRLSKRFEIARQIYNTMVHAELKKLRNIENSQPYRQIQKQIEALNWKNQNDKARLKSLYNDRNKLLNTIGFSEYGFKADIKYYYKHFNDNIGSSVAVHGIAPQVWAAFEKMLFHKEGKKVHYKKKDDIHSLHGYSVTGKSGGVGIIFRKTYIEWKGLKLPLKRSPDNAYETEMLGRRVKYVRLLRKPGKRKDCWYAQLSLEGKPAIKRDPESGKRRHSIGRGAVGLDIGPQTLAYSACGAADLVELADQVQNIEQMKRRLQRKLDRSRRATNPDNYADNGTIRRGVKLTHNKSNRYRRTQRELRYLQHCQAEIRKRQHIELANHLLALGDCFYVEDMAWPSLTHRAKETAISEKTGRIKRKKRFGKSVANKAPATLIGILEQKCNSLGLPGVVKVPTSLRASQYNHQSGEYTSKPLSQRWNNMPDGERIQRDLYSAFLLQHYDPKAGNFDSALLQQDYPQFVQYHHRAIQRLSTVPKTLSSMGIQRSLR

SEQ ID NO: 2355 - protein, 511 aa, Unknown
  Description of Unknown: uncultivated organism sequence
  Category: MG81 effectors
  Description: MG81-636 effector
MKKSNTDTCCLTLPLKLEKWQEDRLAKRFEIARQIYNTMVHAELKKLRNIEISQPYRQIQKQIEALNWKNQNDKARLKSLYNDRKKLLNTIGFSEYGFKADIKYYYKHFNDNIGSSVAVHGIAPQVWAAFEKMLFHKEGKKVHYKKKDDIHSLHGYSVTGKSGGVEIIFRKTYIEWKGLKLPLKRSPDNAYETEMLGRRVKYVRLLRKPGKRKDCWYAQLSLEGKPAIKRDPESGKRRHSIGRGAVGLDIGPQTLAYSACGAADLVELADQVQNIEQMKRRLQRKLDRSRRATNPDNYADNGTIRRGVKLTHNKSNRYRRTQRELRYLQHCQAEIRKRQHIELANHLLALGDCFYVEDMAWPSLTHRAKETAISEKTGRIKRKKRFGKSVANKAPATLIGILEQKCNSLGLPGVMKVPTSLRASQYNHQSGEYTSKPLSQRWNNMPDGERIQRDLYSAFLLQHYDPKAGNFDSALLQQDYPQFVQYHHRAIQRLSTVPKTLSSMGIQRSLR

SEQ ID NO: 2356 - protein, 509 aa, Unknown
  Description of Unknown: uncultivated organism sequence
  Category: MG81 effectors
  Description: MG81-637 effector
MRSTTETCCLTLPLVLEKWQSDRLEKRFEIARQIYNTLLNFELKKLRRLEQSEEYVAIQENIQTELQSEKPDQAARTALYRQRDKLRKDAGFTEYAFKTDIKDFYKHFKTNIASSVAVHGIAPQVWAAFDKLFYKNGKAVHFKKRGDLRSVQGYSTKKRSGGTEIIFRGTYVEWNKLKLPVKLDPGNAYETEMLQKFVKYCRILKKPGKKKPRWYVQLMLEGKPAVKREKFTEAIKHPVGSGPVGIDIGPQTIAYAAETETALEELAEGVQNIEREKRLLQRKLDRSRRSTNPDNFQADGTVKRGVKLQWNKSKRYQRIQHELAFLQHQQAELRKRQHIQLANHLLSLGDRFYVEDMDWPALTHRAKDTAISEKTGKFKRKKRFGKSVGNKAPATFLGILNQKLLSRGYPGIVKVPTSVKASQFNHITGDFQKKPLSQRWNDMPDGRRIQRDMYSAFLLQHMNEQNDGFDVDALHRDYQRFLAQHDAMIRELQKKKKTISSMGIARNAS

SEQ ID NO: 2357 - protein, 371 aa, Unknown
  Description of Unknown: uncultivated organism sequence
  Category: MG81 effectors
  Description: MG81-638 effector
MFREDRIIWNQQGNRDRKKVKREFLLKLSPDNPYEAEMLKRHVKFVRILRKDGKTKPHWYAQLVLEGKPAVKRDPISSAPKHPVGHGVVGIDIGTRTLAYSTDKEVNLLELADHVQNIEQEKRRLQRKMDRSRRATNPENYNPDGTFKRGVKLTRNKSKRYRRIQHQLAMIQHHQADIRKQQHNELANYLLTLGDCFFVENMSYCDLVHRANKTEISEKTGRYKRKKRFGKSIANKAPAMLITMLKQKCQSRGLKGVKEVDTHVRASQYNHQTDTCIEKALENRWNVMPDGERIQRDLYSAFLLQHCKQGLPEYNRKELKKEFGEELYRVFDREALQRDYPQFVAYHHMTIQRLSELPHTIPSMGIRRIIS

SEQ ID NO: 2358 - protein, 503 aa, Unknown
  Description of Unknown: uncultivated organism sequence
  Category: MG81 effectors
  Description: MG81-639 effector
MLPDTAFKTGKWQEDRLAKRFEIARQIYNTMVRAELKKLRAMEQSEPYKANQEKIQALDWKTQTDKQALKALYKERDKLLRDGGFSEYGFKSDIKNYYKHFNNNIGSNVAFHGIAPQVWAAFEKMLFKKEGKKVHFKKKGDIHSLRGYSAAGKSGGVEIIFRETYIEWKGLKLPLKLSPDNIYETQMLSYRVKYVRLLRKPGKRKDRWYAQLSLEGKPVIKYNPKTGEVRHPIGKGAVGLDIGPQTLAYSAATGADLVELANQVQNVEQEKRRLQRKLDRSRRATNPGNYADDGTIRRGIALTHNKSKRYLRTQQELKYLQHQQAEIRKRQHTELANHLLSLGDCFYVEKMVWTSLTHRAKETEISEKTGKIKRKKRFGKSVANKAPATLIGILQRKSAALGIPGVIEVPTSVKASQYNHQSGTYTPKPLSQRWNNMPDGERIQRDLYSAFLLQHYDPQTNTFDANSLHQDYPQFVQYHHDAVLRLYAMPKTPSSMGIKRSLR

SEQ ID NO: 2359 - protein, 512 aa, Unknown
  Description of Unknown: uncultivated organism sequence
  Category: MG81 effectors
  Description: MG81-640 effector
MPTKQKEGGNRCVLTLPLLTEPWQEHIIEKRFKIIEHLKNQLISIELRKLKKLQRTKAYKNLIKQIESVPKSERTVLYKERNKMLKDAGFSQYTFMDDMARKKSLMQKHFESHINVQIAHKAAIDVWSSFEKFLFGTGQIVHYQKRGTLSSVASKSPKTGMFYYSDENIFKWSGGGTKPKGGIILCLRVASVKTNYEKEMVANNEIKYYRVVRKWMKTKYKYYLQITFAGKPADKHREISTGRVGIDIGTQTIAIASDKSVKLLELADKVNKNHIKKCELQRKLDRSRRYTNPDNFNPDGTVKRGTKGHKLKWNKSKHYLEVAGKIRELERKNADIRKYQHTCLANDILAMGNQIYIEPMNYKGLQKRAKETQVDEKGRYKKKKRFGKSLANKAPAMFVTILKTKAEQHGGEVYEVDIMSYRASQCDHTTGEYTKHGLNDRWRILGNGDKVQRDLYSAFLIKNSNKTHDEIDLDKCSKTYDSFKKLHDKEIENIRNEVILRKRRNISSYGIA

SEQ ID NO: 2360 - protein, 162 aa, Unknown
  Description of Unknown: uncultivated organism sequence
  Category: MG81 effectors
  Description: MG81-641 effector
MGNQIYIEPMNYKGLQKRVKETQVDEKGRYKKKKRFGKSLANKAPSMFVTILKTTAEQHGGEVYEVDIMSYRASQCDHTTGEYTKHGLNDRWRILGNGDKVQRDLYSAFLIKNSNKTHDEIDLDKCSKTYDNFKKLHDKEIENIRNEVKLRERRNISSYGIA

SEQ ID NO: 2361 - protein, 521 aa, Unknown
  Description of Unknown: uncultivated organism sequence
  Category: MG81 effectors
  Description: MG81-644 effector
MMATWKGGIPVGKSSTDTCCLTLPLKLEKWQEDRLAKRFEIARQIYNTMVRAELKKMDRVKQLPEYRKNQKEIQALDWKNSADKQRLKELYGNQNRILQKQGFTKYGFKSDSKDYYKHFIENIGSSVATHCIAPQVWNAFDKMLFQKDGKVVHFKRYGDVHSLKGGSVTNKSGGAEIMFRKTYIEWKGLKLPLKLSPNNAYEAEMLSYRVKYVRILRTRGKTKDRWYAQFSLEGKPAVKYDSSTGKPVHPVGRGAVGLDIGPQTLAYAAANEANLVELADQVQNIEQEKRRLQRKLDRSRRATNPDNYNENGTIRKGVKLTHNKSKRYCKLQKELSWIQHCQAETRKRQHIALANHLLSLGDCFYVEPMAWPSLTHRAKKTEVSEKTGRIKRKKRFGKSVANKAPASLIGILKLKCISLGLTGVVEVPMLLKASQYNHQSKDYAPKSLSQRWNDMPDGNRIQRDLYSAFLLQHYNSQLENFNQETLERDYPQFVRLHNQTIQRLSALPKTPSSMGIRRSVS

SEQ ID NO: 2362 - protein, 528 aa, Unknown
  Description of Unknown: uncultivated organism sequence
  Category: MG81 effectors
  Description: MG81-645 effector
MAKKNNNNNNTDTCVLTLPLRVEKWQEDCLLKRFEAARRIYNSLLNFELKKLRQLERTVEYRQIQSVISSAYRSNTKDSPECKAALKRREKLIDENGLTKNGFKNDVKFFYKHFDGLIGSSVAVHCIAVQLWAAFNKYLCGNGKEIHFKRLGDISSLKGYSVKGKSGGCEIIFRGQYVEWTRKKKKLLLPLKIDPDNEYEREMLSRRVKYVRIIKKPGKNRLRWYAQLTLEGKPALKYSAETGKPIHSVGKGDVGIDIGPQTVAYASDKEVALLELADRVTNIEHQKKKLQRKLDRSRRATNPDNYKPDGTIKRGVKLTRNKSKRYLKLQSKLAYIQHRQAEIRKLQHTCLANHMLTLGDRFFVEKMNWPGLAHRAKETSISEKTGRYKRKKRFGKSLANKAPAMFISILKQKCETLGLPGVVEVDTFRLKASQYNHLSDTCEKKSLSERWNYMPISDGSDSSKTKRIQRDLYSAFLLQHTIPQSCSFDKEALRIDYPNFVTMHDAEIHRLESLPKTITSMGVRRSHS

SEQ ID NO: 2363 - protein, 365 aa, Unknown
  Description of Unknown: uncultivated organism sequence
  Category: MG81 effectors
  Description: MG81-646 effector
MIEKTNLKTLKVRVKDKHQSILERMAFEVNQVWNAANEITATYSYIPVPEVGWLRNNFSAFDLQKDLKSIKAERGFILHSTTIQEVIAVHYKSRRQFKTDKLRWRVSGGTRRSLGWIPFKSGAAQWKNGQVYFAGHFFKVWDSYGLSQFEFRSGSFSQDSRGRWYFNIVVEAAQIASQATGQVGIDLGLKEVATCSNGLKLESKQFYRQLETKLGVAQRANKKQRVKAIHAKIKNRRLNHIHQFTTRLVKDNALIVVGNVNSSQLAKTKMAKSVLDAGWYILKTQLDYKSKAMQAVFIEVNESYTTQACSCCGSISANSPKGRAGLRIREWSCPECGALHDRDINAAKNILALGHERLAAGIRAL

SEQ ID NO: 2364 - protein, 354 aa, Unknown
  Description of Unknown: uncultivated organism sequence
  Category: MG81 effectors
  Description: MG81-647 effector
MVGHLCRPHRHAPAVERHRAGDLVRVRARLGGERRQERRYKKGIKTRDQSRGWHQAVLMVQRYHREIADARADALHQCSRRIVDMGAETIVMRDNDVAGMLARDAQNTDADRQRRNRIAPLVAQMGGMYELRRQVTYKQQWAGGRVELVPEHEPTTLRCSVCLAVRDTDPGYPEFSCPSCGHVEDREANSARNLLDYVPPPENGSDKNFTGTGNGDGGAGGRAVRQKRGRKPKRMAGGTGPLEAEQSAASPEGGATSVLGPGNHAPDAQAPGVTDAAAASVAAAIQVDGGMVPPPRKRHTTAHERERSSDADPATESSRALGGERATRKRDRSQSVPQRRGSPRDPQEPSGAAA

SEQ ID NO: 2365 - protein, 511 aa, Unknown
  Description of Unknown: uncultivated organism sequence
  Category: MG81 effectors
  Description: MG81-648 effector
MKKSNTDTCCLTLPLKLEKWQEDRLAKRFEIARQIYNTMVHAELKKLRNIENSQPYRQIQKQIEALNWKNQNDKARLKSLYNDRNKLLNTIGFSEYGFKADIKYYYKHFNDNIGSSVAVHGIAPQVWAAFEKMLFHKEGKKVHYKKKDDIHSLHGYSVTGKSGGVEIIFRKTYIEWKGLKLPLKRSPDNAYETEMLDRRVKYVRLLRKPGKRKDCWYVQLSLEGKPAIKRDPESGERRHSIGRGAVGLDIGPQTLAYSACGAADLVELADQVQNIEQMKRRLQRKLDRSRRATNPDNYADNGTIRRGVKLTHNKSNRYRRTQRELRYLQHCQAEIRKRQHIELANHLLALGDCFYVEDMAWPSLTHRAKETAISEKTGRMKRKKRFGKSVANKAPATLIGILEQKCNSLGLPGVVKVPTSLRASQYNHQSGEYTSKPLSQRWNNMPDGERIQRDLYSAFLLQHYDPKAGNFDSALLQQDYPQFVQYHHRAIQRLSTVPKTLSSMGIQRSLR

SEQ ID NO: 2366 - protein, 523 aa, Unknown
  Description of Unknown: uncultivated organism sequence
  Category: MG81 effectors
  Description: MG81-649 effector
MPTKQKEDSNRCVLTLPLLTEPWQEHIIEKRFKIIEHLKNQLISIELRKLKKLQRTKAYKNLIKQIESVPKSERTVLYKKRNKMLKDAGFSQYTFMDDMAGKKSLMQKHFESHINVQIAHKAAIDVWSSFEKFLFGTGQMIHYQKRGTLKSIASKSPKNGMHYFPESNTFKWSGGRQKKIGQKGEQKKVSIKPISLCLRVSPLKTDYEKEMVANNEIKYYRVVRKWMKTKYKYYLQITFAGKPADKHREISTGRVGIDIGTQTIAIASDKSVKLLELADKVNKNHIKKCELQRKLDRSRRYTNPDNFNPDGTVKRGTKGHKLKWNKSKHYIEIAGKIRELERKNADIRKYQHTCLANDILAMGNQIYIEPMNYKGLQKRAKETQVDEKGRYKKKKRFGKSLANKAPAMFVTILKTKAEQHGGEVYEVDIMSYRASQCDHTTGEYTKHSLNDRWRILGNGDKVQRDLYSAFLIKNSNKTHDEIDLDKCSKTYDIFKKLHDKEIENIRNEVKLRERKNISSYGIA

SEQ ID NO: 2367 - protein, 512 aa, Unknown
  Description of Unknown: uncultivated organism sequence
  Category: MG81 effectors
  Description: MG81-650 effector
MPTKQKEDSNRCVLTLPLLTEPWQEHIIEKRFKIIEHLKNQLISIELKKLKNLQRTKAYKNLIKQIESVPKSERTALYKERNKMLKDAGFSQYTFMDDMAGKKSLMQKHFESHINVQIAHKAAIDVWSSFEKFLFGTGQMIHYQKRGTLSSVASKSPKTGMFYYSDENIFKWSGGGTKPKGGIILCLRVASVKTNYEKEMVANNEIKYYRVVRKWMKTKYKYYLQITFAGKPADKHREISTGRVGIEIGTQTIAIASDKSVKLLELADEVNKNHIKKCELQRKLDRSRRYTNPDNFNPDGTVKRGTKGYKLKWNKSKHYIEIAGKIRELERKNADIRKYQHTCLANDILAMGNQIYIEPMNYKGLQKRAKETQVDEKGRYKKKKRFGKSLANKAPAMFVTILKTKAEQHGGEVYEVDIMSYRASQCDHTTGEYTKHGLNDRWRILGNGDKVQRDLYSAFLIKNSNKTHDEIDLDKCSKTYDNFKKLHDKEIENIRNEVILRKRRNISSYGIA

SEQ ID NO: 2368 - protein, 512 aa, Unknown
  Description of Unknown: uncultivated organism sequence
  Category: MG81 effectors
  Description: MG81-651 effector
MKKSNTDTCCLTLPLKLGKWQEDRLAKRFEIARQLYNTLVHAELKRLAQVKQTAEYRENERKIRTLDWNDPGDQAKLKGLYKERRKSLKTAGFTDYSFTTDMGKYYKHFRDNIGSNVALHGIAPQVWAAFDKLLFKKGGKKVHYKKPGEVNSVQGYSRTGKSGGTEIMFREPYIEWKGLKLPLKLSPDNAYETDMLQRRVKLVRLVRRPGKRRDRWYAQLVLEGKPAIKADPVTGKAVHPIGSGPVGLDIGPQTLAYSAAGAAGLVELADRVQNIEQEKRRLQRKMDRSRRAANPDNYAEDGTIRRGVKLTHNKSKRYRRSQQELKYLQHRQAEIRKLQHIQFANHLLSLGDHFYVEKMEWSSLTHRAKETVISEKTGKPRSKRRFGKSIANKAPAMLIEILRQKCKSLGLSDVVEINPADIKASQYNHLTGEYVKKSLSRRWNDMQDGEHLQRDLYSAFLLQHYDSCSKTLDHDSIVRDYPAFVQYHHREIERLHALPKTPSSMGIRRSIA

SEQ ID NO: 2369 - protein, 512 aa, Unknown
  Description of Unknown: uncultivated organism sequence
  Category: MG81 effectors
  Description: MG81-652 effector
MPTKQKEDSNRCVLTLPLLTEPWQEHIIEKRFKIIEHLKNQLISIELRKLKNLQRTKAYKNLIKQIESVPKSERTVLYKERNKMLKDAGFSQYTFMDDMAGKKSLMQKHFESHINVQIAHKAAIDVWSSFEKFLFGTGQIVHYQKRGTLSSVASKSPKTGMFYYSDENIFKWSGGGTKPKGGIILCLRVASVKTNYEKEMVANNEIKYYRVVRKWMKTKYKYYLQITFAGKPADKHREISTGRVGIDIGTQTIAIASDKSVKLLELADKVNKNHIKKCELQRKLDRSRRYTNPDNFNPDGTVKRGTKGHKLKWNKSKHYIEIAGKIRELERKNADIRKYQHTCLANDILAMGNQIYIEPMNYKGLQKRAKETQVDEKGRYKKKKRFGKSLANKAPAMFVTILKTKAEQHGGAVYEVDIMSYRASQCDHTTGEYTKHGLNDRWRILGNGDKVQRDLYSAFLIKNSNKTHDEIDLDKCSKTYDSFKKLHDKEIENIRNEVMLRGRKNISSYGIA

SEQ ID NO: 2370 - protein, 512 aa, Unknown
  Description of Unknown: uncultivated organism sequence
  Category: MG81 effectors
  Description: MG81-653 effector
MPTKQKEDSNRCVLTLPLLTEPWQEHIIEKRFKIIEHLKNQLISIELRKLKNLQRTKAYKNLIKQIESVPKSERTVLYKERNKMLKDAGFSQYTFMDDMAGKKSLMQKHFESHINVQIAHKAAIDVWSSFEKFLFGTGQIVHYQKRGTLSSIASKSPKTGMFYYSDENIFKWSGGGTKPKGGIILCLRVASVKTNYEKEMVANNEIKYYRVVRKWMKTKYKYYLQITFAGKPADKHREISTGRVGIDIGTQTIAIASDKSVKLLELADKVNKNHIKKCELQRKLDRSRRYTNPDNFNPDGTVKRGTKGHKLKWNKSKHYLEIAGKIRELERKNANIRKYQHTCLANDILAMGNQIYIEPMNYKGLQKRAKETQVDEKGRYKKKKRFGKSLANKAPAMFVTILKTKAEQHGGEVYEVDIMSYRASQCDHTTGEYTKHGLNDRWRILGNGDKVQRDLYSAFLIKNSNKTHDEIDLDKCSKTYDSFKKLHDKEIENIRNEVILRKRRNISSYGIA

SEQ ID NO: 2371 - protein, 512 aa, Unknown
  Description of Unknown: uncultivated organism sequence
  Category: MG81 effectors
  Description: MG81-654 effector
MPTKQKEGGNRCVLTLPLLTEPWQEHIIEKRFKIIEHLKNQLISIELRKLKKLQRTKAYKNLIKQIESVPKSERTVLYKERNKMLKDAGFSQYTFMDDMAEKKSLMQKHFESHINVQIAHKAAIDVWSSFEKFLFGTGQIVHYQKRGTLSSVASKSPKTGMFYYSDENIFKWSGGGTKPKGGIILCLRVASVKTNYEKEMVANNEIKYYRVVRKWMKTKYKYYLQITFAGKPADKHREISTGRVGIDIGTQTIAIASDKSVKLLELADKVNKNHIKKCELQRKLDRSRRYTNPDNFNPDGTVKRGTKGHKLKWNKSKHYLEVAGKIRELERKNADIRKYQHTCLANDILAMGNQIYIEPMNYKGLQKRAKETQVDEKGRYKKKKRFGKSLANKAPAMFVTILKTKAEQHGGEVYEVDIMSYRASQCDHTTGEYTKHGLNDRWRILGNGDKVQRDLYSAFLIKNSNKTHDEIDLDKCSKTYDSFKKLHDKEIENIRNEVILRKRRNISSYGIA

SEQ ID NO: 2372 - protein, 512 aa, Unknown
  Description of Unknown: uncultivated organism sequence
  Category: MG81 effectors
  Description: MG81-655 effector
MPTKQKEGGNRCVLTLPLLTEPWQEHIIEKRFKIIEHLKNQLISIELRKLKNLQRTKAYKNLIKQIESVPKSERTVLYKERNKMLKDAGFSQYTFMDDMAGKKSLMQKHFESHINVQIAHKAAIDVWSSFEKFLFGTGQIVHYQKRGTLSSVASKSPKTGMFYYSDENIFKWSGGGTKPKGGIILCLRVASVKTNYEKEMVANNEIKYYRVVRKWMKTKYKYYLQITFAGKPADKHREISTGRVGIDIGTQTIAIASDKSVKLLELADKVNKNHIKKCELQRKLDRSRRYTNPDNFNPDGTVKRGTKAHKLKWNKSKHYIEIAGKIRELERKNADIRKYQHTCLANDILAMGNQIYIEPMNYKGLQKRAKETQVDEKGRYKKKKRFGKSLANKAPAMFVTILKTKAEQHGGEVYEVDIMSYRASQCDHTTGEYTKHGLNDRWRILGNGDKVQRDLYSAFLIKNSNKTHDEIDLEKCSKTYDNFKKLHDKEIENIRNEVILRKRRNISSYGIA

SEQ ID NO: 2373 - protein, 511 aa, Unknown
  Description of Unknown: uncultivated organism sequence
  Category: MG81 effectors
  Description: MG81-656 effector
MGKSSTDTCCLTLPLKLEKWQEDRLAKRFEIARQIYNTMVRAELKRLRQVEQSPQYRSNKKAIQALDWKNTADKPKLKTLYRERDKLLKGGGFTEYGFKSDIKNFYKHFAENIGSSVAVHGIAPQVWAAFERVLFKKEGKKVHFKKTGDIRSLRGYSVTGKSGGVEIIFRGSYIEWKGLNLPLKLSPDNAYETEMLSYRVKYVRILRKPGKTRDRWYAQLSLEGKPAIKRNPASGNPVHPVGQGAVGLDIGPQTLAYAAEKEANLVELADRVQNIEREKHLLQRKMDRSRRAANPDNYAENGTIRRGVKLTHNKSKRYLRLQRELCYLQHCQAETRKRQHTELANHLLSLGSCFYVEDMAWPSLTHRAKKTEISDKTGRIKRKKRFGKSIANKAPAALINILRTKCVSLGIPGVVEVPTSLKASQYNHQSKEYTPKPLSQRWNDMPDGSRIQRDLYSAFLLQHYDPQSGNFDQASLEADYPQFVQLHNQSIQRLLTVPKAPSSMGIRRSVS

SEQ ID NO: 2374 - protein, 512 aa, Unknown
  Description of Unknown: uncultivated organism sequence
  Category: MG81 effectors
  Description: MG81-657 effector
MPTKQKEDSNRCVLTLPLLTEPWQEHIIEKRFKIIEHLKNQLISIELRKLKNLQRTKAYKNLTKQIESVPKSERTALYKERNKMLKDAGFSQYTFMDDMAGKKSLMQKHFESHINVQIAHKVAIDVWSSFEKFLFGTGQIVHYQKRGTLSSVASKSPKTGMFYYSDENIFKWSGGGTKPKGGIILCLRVASVKTNYEKEMVANNEIKYYRVVRKWMKTKYKYYLQITFAGKPADKHREISTGRVGIDIGTQTIAIASDKSVKLLELADKVNKNHIKKCELQRKLDRSRRYTNPDNFNPDGTVKRGTKGHKLKWNKSKHYIEIAGKIRELERKNADIRKYQHTCLANDILAMGNQIYIEPMNYKGLQKRVKETQVDEKGRYKKKKRFGKSLANKAPAMFVTILKTKAEQHGGEVYDVDIMSYRASQCDHTTGEYTKHGLNDRWRILGNGDKVQRDLYSAFLIKNSNKTHDEIDLDKCSKTYDNFKKLHDKEIENIRNEVKLRERKNISSYGIA

SEQ ID NO: 2375 - protein, 341 aa, Unknown
  Description of Unknown: uncultivated organism sequence
  Category: MG81 effectors
  Description: MG81-658 effector
MVGRRNKTKGWYYSLLAVASVKTNYEKEMVANNEIKYYRVVRKWMKTKYKYYLQITFAGKPADKHREISTGRVGIDIGTQTIAIASDKSVKLLELADKVNKNHIKKCELQRKLDRSRRYTNPDNFNPDGTVRRGTKGHKLKWNKSKHYIEIAGKIRELERKNSDIRKYQHTCLANDILAMGNQIYIEPMNYKGLQKRAKETQVDEKGRYKKKKRFGKSLANKAPSMFVTILKTKAEQHGGEVYEVDIMSYRASQCDHTTGEYTKHGLNDRWRILGNGDKVQRDLYSAFLIKNSNKTHDEIDLDKCSKTYDNFKKLHDTEIENIRNEVKLRERKNISSYGIA

SEQ ID NO: 2376 - protein, 360 aa, Unknown
  Description of Unknown: uncultivated organism sequence
  Category: MG81 effectors
  Description: MG81-659 effector
MFTYRYRIRDSSSKVRLKKLASSVNFVWNYVNKLSFENIKQHGRFLSTYDVNYYLNGCSKGLEIGSSSIQEIARFYVQTRQQFKKRKLSWRSAKRSLGWVPLRHDGFKLKNDTVRYCGHDFKLWKHRELPQGAKIKTGSFVQDARDRWYLNVSFEVPDVEVHALPRTEVGIDLGIKNQLTLSTGENFTRGSETKKFAVDLAHAQRARKKKRMKAVSAKAANRRSDWTHKVTTDIVRRFATVFVGDLKTSELVAKSSLSNFSSLYDASIGSIKHCLKYKAKKLGGACYVVNEAYTSVTCYFCEARSGPTGKGGLAIREWTCQSCGAVHHRDVNAARNILRRGHSTLQRSLIGGDATLSTSA

SEQ ID NO: 2377 - protein, 511 aa, Unknown
  Description of Unknown: uncultivated organism sequence
  Category: MG81 effectors
  Description: MG81-660 effector
MAKCSTDTCCLTLPLRLEKWQEDRLAKRFEIARQIYNTMVRAELKKLRAMEQSEPYKANQEKIQALDRKTQTDKQALKALYKERDKLLRDGGFSEYGFKSDIKNYYKHFNNNIGSNVAFHGIAPQVWAAFEKMLFKKEGKKVHFKKKGDIHSLRGYSAAGKSGGVEIIFRETYIEWKGLKLPLKLSPDNIYETQMLSYRVKYVRLLRKPGKRKDRWYAQLSLEGKPVIKYNPKTGEVRHPIGKGAVGLDIGPQTLAYSAATGADLVELANQVQNVEQEKRRLQRKLDRSRRATNPGNYADDGTIRRGIALTHNKSKRYLRTQQELKYLQHQQAEIRKRQHTELANHLLSLGDCFYVEKMVWTSLTHRAKETEISEKTGKIKRKKRFGKSVANKAPATLIGILQRKSAALGIPGVIEVPTSVKASQYNHQSGTYTPKPLSQRWNNMPDGERIQRDLYSAFLLQHYDPQTNTFDANSLHQDYPQFVQYHHDAVLRLYAMPKTPSSMGIKRSLR

SEQ ID NO: 2378 - protein, 512 aa, Unknown
  Description of Unknown: uncultivated organism sequence
  Category: MG81 effectors
  Description: MG81-661 effector
MPTKQKEGGNRCVLTLPLLTEPWQEHIIEKRFKIIEHLKNQLISIELRKLKNLQRTKAYKNLIKQIESVPKSERTALYKERNKMLKDAGFSQYTFMDDMAGKKSLMQKHFESHINVQIAHKAAIDVWSSFEKFLFGTGQIVHYQKRGTLSSVASKSPKTGMFYYPDENIFKWSGGGTKPKGGIILCLRVASVKTNYEKEMVANNEIKYYRVVRKWMKTKYKYYLQITFAGKPADKHREISTGRVGIDIGTQTIAIASDKSVKLLELADKVNKNHIKKCELQRKLDRSRRYTNPDNFNPDGTVKRGTKGHKLKWNKSKHYIEIAGKIRELERKNADIRKYQHTCLANDILAMGNQIYIEPMNYKGLQKRAKETQVDEKGRYKKKKRFGKSLANKAPAMFVTILKTKAEQHGGEVYEVDIMSYRASQCDHTTGEYAKHGLNDRWRILGNGDKVQRDLYSAFLIKNSNKTHDEIDLDKCSKTYDNFKKLHDKEIENIRNEVILRKRRNISSYGIA

SEQ ID NO: 2379 - protein, 578 aa, Unknown
  Description of Unknown: uncultivated organism sequence
  Category: MG81 effectors
  Description: MG81-662 effector
MAFGSKNSTPSFVLTLPMVIGLNEQDLLYKEFKKCGIIYNQLVSVTTKMWHQLRKTRKYRELMAAIAKATPDSDEQKALFKRREKMLKEYRFSEDAFHAMVVPYAKHYAINSHVAQSVATAVWAAWSSFFFDNGKEVHYKKLEQVSSIFGKNNATGIILRPANCTTSVINSAKKKIKNSIEEKYFAAYRKPDAKEDEEVALPDEVKTQMEKEIAAATAKVKTSIGKGELRIVYGDYTFPLTLRNPNTQTGWYQQEALKCGVKYCRIIRKWVGTKWKYYAQIVLEGYPPIKCDSNGVAKHSVKQGRVGIDIGTQTIAFSGKDVCDLRVLAPSARAQAKSLVNEIAATLRAMDRSRRATNPKYYNPDGTIKRLKRQHGQKQRREWKYSKRYYRLRAKLRNLYRKLADIRKMEHNILANELLAHGNEFVVEDMNYKALQKRSKETKINPKTGRTHTKKRFGKSLSRCAPATFISILSKKANRYGGTVIKVSTFETKASQFDHTDESYTKKKLSERMARLRSGDIVQRDLYSAFLLEHIDTESLQYNMETLNSAFPAFLEMHENTKQRLQAVGSSLPASIGF

SEQ ID NO: 2380 - protein, 578 aa, Unknown
  Description of Unknown: uncultivated organism sequence
  Category: MG81 effectors
  Description: MG81-663 effector
MAFGSKNSTPSFVLTLPLDINLNEQDYLYKEFKKCGIIYNQLVSVTIKMWHQLRKTRKYRELMAAIAKSASDSDEQKTLYKQREKILKEHHFSEDSFHKLVVPYAKHYAIHSHVAQAIATDVWKAWKSFFFSKGKEVHYKRLDDVSSISGKNNATGIVLRPAKLTTSNLASAKRKVQKTVEQRYYKAYGQSDPKDDKKVILPDSVIPQMEAEIAVAVAKVKPAVGNGSLRIVYGKHEFPVVVRNSNTQTGKYQQEALKCGVKFCRITRKWVKIKWKYYAQLVLEGYPPTKCDSNGVIKHPIKQGCVGLDIGTQTLAISGSDICDLRLLAPSARAQAKGLVNEIARTQRAMDRSRRATNPDCYNPDGTIKRLKCQHGHKQKRDWKYSKRYYRLRARLRDLNRRLADIRKMEHNILANELLEHGNEFIVEDMNYKALQKRSKETKVNAKTGRIHTKKRFGKSLSRCAPAMFITILTNKVTRYGGKVIKVSTFETKASQFDHTDESYTKKKLSERMAHLSSGEVVQRDLYSAFLLEHIDTESLEYNTEALKSAFPAFLKMHENTKKHLQKEENNLPASVGF

SEQ ID NO: 2381 - protein, 578 aa, Unknown
  Description of Unknown: uncultivated organism sequence
  Category: MG81 effectors
  Description: MG81-664 effector
MAFGSKNSMPSFVLTLPLDISLNEQDYLYKEFKKCGVIYNQLVSATTKMWHQLRKTRKYRELMAAIAKATPDSDEQKTLFKQREKMLKEYRFSEDAFHKLVVPYAKHYAINSHIAQAVASNVWKAWSTFFFSKGKEVHYKRLDDLAAISGKNNFTGFVLRPANLTTSNIESAKRKAQKAVEKRYDDMYGRPDPKDDKKVVLPDEVKPQMEAEIAAAIAKIKPTIGEGNLRIVYGKHEFPVVLRNPKTQTGKYQQEALKCGVKYCRITRKWVKNKWKYYAQFILEGYPPTKCDGNGVMKHPVNQGRIGLDIGTQTLAVSGNDICDLRVLAPSARAQARGLTNEIARTTRAMNRSRRATNPQYFNSDGTIKRLKRQHGHKQKRDWKYSKRYFRLKAKLRDLNRRLADIRKMEHNILANELLEHGNEFVIEDMNYKTLQKRSKETKINAKTGRTHTKKRFGKSLSRCAPAKFITILTNKAVRNGGSVIKVSTFETKASQFDHTDESYTKKKLSERMARLRSGDIVQRDLYSAFLLEYIDTESLEYNTKALNSAFPAFLVMHENTKKRLQKDKSYLPASVGF

SEQ ID NO: 2382 - protein, 578 aa, Unknown
  Description of Unknown: uncultivated organism sequence
  Category: MG81 effectors
  Description: MG81-665 effector
MAFGSKNSTPSFVLTLPLNISLNEQDYLYKEFKKCGVIYNQLVSVTTKMWHQLRKTRKYRDLMTAIAKAVPDSEEQKALLKQRQKKIQETGFSEGAFHKMVEPYAKHFAINSHVAQNVASAVWTAWEGFFFSKGKAVHYKKLEDVTSISGKNNATGIVLRPANLTTSNIESAKRKAQKAVEKRYDDMYGRPDPKDDKKVVLPDEVKPQMKAEIAAAIAKIKPTIGKGNLRIVYGKHEFPVVLRNPKTQTGKYQQEALKCGVKYCRITRKWVKTKWKYYAQFILEGYPPTKCDGNGVMKHPVNHGRIGLDIGTQTLAISGKDICDLRVLAPSARAQARGLTNEIARTTRAMNRSRRATNPKYYNSDGTIKRLKRKHGHKQRRDWKYSKRYFRLKAKLRDLNRRLADIRKMEHNILANELLQHGNEFVVEDMNYKALQKRSKETKVNPKTGRAHTKKRFGKSLSRCAPAMFISILNKKANRYGGSVIKVDTFETKASQFDHTDESYTKKRLSERMAHLSSGEVVQRDLYSAFLLEHIDIESLQYNMETLNSAFPAFLEMHENTKRRLQAVGSSLPASIGF

SEQ ID NO: 2383 - protein, 578 aa, Unknown
  Description of Unknown: uncultivated organism sequence
  Category: MG81 effectors
  Description: MG81-666 effector
MAFGSKNSTPSFVLTLPMVIGLNEQDLLYKEFKKCGIIYNQLVSVTTKMWHQLRKTRKYRELMAAIAKATPDSDEQKALFKRREKMLKEYRFSEDAFHAMVVPYAKHYAINSHIAQAVASDVWKAWSTFFFSKGKEVHYKRLDDLAAISGKNNSTGIVLRPANLTTNNIESAKRKAQKAVEERYDDMYGRSDPKDDKKVVLPDDVKPQMEAEIAAATAKVKTSIGKGELRIVYGDYTFPLTLRNPNTQTGWYQQEALKCGVKYCRIIRKWVGTKWKYYAQIVLEGYPPIKCDSNGVAKHSVKQGRVGIDIGTQTIAFSGKDVCDLRVLAPSARAQAKSLVNEIAATLRAMDRSRRATNPKYYNPDGTIKRLKRQHGQKQRREWKYSKRYYRLRAKLRNLYRKLADIRKMEHNILANELLAHGNEFVVEDMNYKALQKRSKETKINPKTGRAHTKKRFGKSLSRCAPATFISILSKKANRYGGTVIKVSTFETKASQFDHTDESYTKKKLSERMARLRSGDIVQRDLYSAFLLEHIDTESLQYNMETLNSAFPAFLEMHENTKQRLQAVGSSLPASIGF

SEQ ID NO: 2384 - protein, 578 aa, Unknown
  Description of Unknown: uncultivated organism sequence
  Category: MG81 effectors
  Description: MG81-667 effector
MAFGSKNSTPSFVLTLPMVISLNEQDLLYKEFKKCGIIYNQLVCITTKMWHQLRKTRKYRELMADIAKAAPDSDEQKALLKQREKMLKEYRFSENAFHAMVVPYAKHYALHSHVAQMVATAVWAAWSSFFFDNGKEVHYKKLEQVFSISGKNNTTGIMLRPANHTTSVINSAKKKIKGSIEEKYFAAYRKPDAKEGEEVVLPDEVKTQMEKEIAAATAKVKTSIGKGELRLVYGDYTFPLTLRNPDTQAGWYQQEALKCGVKYCRIIRKWVGTKWKYYAQIVLEGYPPIKCDSNGVAKHPVKQGRVGIDIGTQTIAFSCKDVCDLRVLAPSARAQAKSLVNEIAATLRAMNRSRRATNPKYYNPDGTIKRLKRQHGQKQKREWKYSKRYYRLRAKLRNLYRKLADIRKMEHNILANELLAHGNKFVVEDMNYKALQKRSKETKINPKTGRAHTKKRFGKSLSRCAPAMFISILSNKANRYGGSVIKVSTFETKASQFDHTDNSYTKKKLSERMARLRSGDIVQRDLYSAFLLEHIDIESLQYNMETLNSAFPAFLGMHENTKQRLQAVGSSLPASIGF

SEQ ID NO: 2385 - protein, 358 aa, Unknown
  Description of Unknown: uncultivated organism sequence
  Category: MG81 effectors
  Description: MG81-668 effector
MVKTFSFRIKDSTSAKHLYAMARAVNFVWNYCNEVQKKAANSHRPWVNWVMLNNLTSGCSKELRLHSQTIQAIDECYATSLKEAKSPTGKKKRFLRFRGRRSQGWIPFKASGIKLRKDSVVYQGRIFRFWKTRSIPEQIKGGNFSCDVRGRWYLNLVCEYEEALVSNEGSVGIDLGLKSLATLSNGKKYDAQKFFRKYERKLAHHQRCNNARQVRTIHAKIANSRKDFNHKVSHELTRDFNKVFIGDVDSLGLLKTRLAKSVSDASWGQLRTFIEYKAIARGGTYYVVDENNTTRTCSACGCLTGPSGLAGLRVREWQCKECGTVHDRDTNSAINIEQRGLSTLHSPLRTLSAKEEIP

SEQ ID NO: 2386 - protein, 512 aa, Unknown
  Description of Unknown: uncultivated organism sequence
  Category: MG81 effectors
  Description: MG81-669 effector
MPTKQKEDSNRCVLTLPLLTEPWQEHIIEKRFKIIEHLKNQLISIELRKLKKLQRTKAYKNLIKQIESVPKSERTVLYKKRNKMLKDAGFSQYTFMDDMAGKKSLMQKHFESHINVQIAHKAAIDVWSSFEKFLFGSGQMIHYQKRGTLSSVASKSPKTGMFYYSDENIFKWSGGGTKPKGGIILCLRVAPVKTNYEKEMVANNEIKYYRVVRKWMKTKYKYYLQITFAGKPADKHHEVSTDRVGIDIGTQTIAIASDKSVKLLELADKVNKNHIKKCELQRKLDRSRRYTNPDNFNPDGTVKRGTKGHKLKWNKSKHYIEIAGKIRELERKNADIRKYQHTCLANDILAMGNQIYIEPMNYKGLQKRAKETQVDEKGRYKKKKRFGKSLANKAPAMFVTILKTKAEQHGGEVYEVDIMSYRASQCDHTTGEYTKHGLNDRWRILGNGDKVQRDLYSAFLIKNSNKTHDEIDLDKCSKTYDNFKKLHDKEIENIRNEVILRKRRNISSYGIA

SEQ ID NO: 2387 - protein, 401 aa, Unknown
  Description of Unknown: uncultivated organism sequence
  Category: MG81 effectors
  Description: MG81-670 effector
MPTKQKEGGNRCVLTLPLLTEPWQEHIIEKRFKIIEHLKNQLISIELRKLKKLQRTKAYKNLIKQIESVPKSERTVLYKERNKMLKDAGFSQYTFMDDMAGKKSLMQKHFESHINVQIAHKAAIDVWSSFEKFLFGTGQIVHYQKRGTLSSVASKSPKTGMFYYSDENIFKWSGGGTKPKGGIILCLRVASVKTNYEKEMVANNEIKYYRVVRKWMKTKYKYYLQITFAGKPADKHREISTGRVGIDIGTQTIAIASDKSVKLLELADKVNKNHIKKCELQRKLDRSRRYTNPDNFNPDGTVKRGTKGHKLKWNKSKHYLEVAGKIRELERKNADIRKYQHTCLANDILAMGNQIYIEPMNYKGLQKRLKKRKLTKKADIKRKSVLENLLPIKRRQCLLQF

SEQ ID NO: 2388 - protein, 116 aa, Unknown
  Description of Unknown: uncultivated organism sequence
  Category: MG81 effectors
  Description: MG81-671 effector
MFVTILKTKAEQHGGEVYEVDIMSYRASQCDHTTGEYTKHGLNDRWRILGNGDKVQRDLYSAFLIKNSNKTHDEIDLDKCSKTYDSFKKLHDKEIENIRNEVILRKRRNISSYGIA

SEQ ID NO: 2389 - protein, 1268 aa, Unknown
  Description of Unknown: uncultivated organism sequence
  Category: MG81 effectors
  Description: MG81-672 effector
MKVSKVKHRRTAVSVNKKNNTVKGILYDDPIKKDSKGDGASAYVSTKYVVDDVVRNSSRLYSPFNSKKLIIDDKTKVVANSLRQHFKNFVKIYLNCESIDEQQMKFTPDNKYLMDNRVRISLPSDVNEEKLVEAIVNSSLRKSLNKKCNIQIKAGLRETFDIPELIKKAIKIYCIDEKRNLNDAEKLDMYALFSFMYEDKYKNRQKKLIINSISNQVTKVKVCENGNRLLKLSIADTKKKPLWDFMIEYSNSDKKKQDTMLRNIRKSIVLFVCGVENYKNIENDNKLDICSWDGYDINENQQFVCVNTNNSNDDYFISSTELRRANLDHYMKAVAKLNDDRNKFWFQHFESVIETFFSKKAKRNIERIKSAYLCEYLWRDFCSYVALKYVDLGKGVYHFTMADKLALINRNKYEKSIIFGEIESRYNNGISSFDYERIKAEELFERNISTYTTFATNIFSKAVVQDDYIKNHNKASDVLQYSDKEFSDSKVLRNDAMKRILQYWGGQSRWNNTLNKINVDTLCIDIKEHLSNIRNSSVHYTSKVSLSGDKNESIVYMLFKKDFAEIRNIFASKYYSNNVWMFYSIEKINGLMEYLYGDNSTVIDAQIPAYNNIIKRKNIADVIEKIIKKNSYKTINELELIKKYRACLYFILKEIYYNRFIKQENLKEQFIQFVDNDNNLLDDNKNAVESFRRRIHDIDNSLMSFGEMCQFIMTDYNMQNQGNKSIKSKDRQNEDKKKGIDGSYKHFPLLLYHVIKELFLKYIKTDEKIVFIREPANIGSVKTQDEFETHISTLGLYKTLKEKVDSNMSLLDWYTLSHFLMPKQLNYLIGDIKNYIQYLRNIDKRAESVGNNKAYDIDGKINNYYDIVYVLDFSLQYIGRISNEITDYFADEDEYALFMSQFVDFSSDNIVGLKTFCNEKTSNGKHTIGLYCDGANPIMNRNIAYAKMYSNDKILSRTYSKVTIKEIERYYRIQDDLKNVFENGVCKNKDQQKELCDFQKIKNHIELTEISIYTNILNDFMSQFISWSYLRERDLMYFQLGMHYLRLYYGTNELETKYNKLVGESVNIEKGALLYQIAAMYTYKLPIYKVDKNGSAVLAEKQGGTGASVTSFVTEYCKENMRDAIIYEKGLELFEDVKQHKKWSDFRNDIAHMRYISDRDKSIMDIISEIYGGFFTYDIKLKKSIPVIFKNILMRYAVDANLNFLHKENRKLKDTLINIRADKGLVSDKYTYKIGEKDTVDIEVRNDKFLLQLRKLLEYKIRVNGNVL

SEQ ID NO: 2390 - protein, 352 aa, Unknown
  Description of Unknown: uncultivated organism sequence
  Category: MG81 effectors
  Description: MG81-673 effector
MKHTKTLQVRVRDKHTQLLRQMARQVNFVWNYLNELSHRSIRERGVFLSAYDLDRYTQGASKELGLHSQTLQEVSREYATRRRQFKKARLSWRKSIGVRRSLGWIPFKSGAASWKNGQVFHNGRCFKVWDSYGLGQYRLRSGSFSEDARGRWYFNVVVELETQLSTGQGAVGIDLGLKDVATCSDGQRLENGRFYRDLEPKLASAQRAGKKARVRAIHAKIANRRKDALHKFSRSLVERCNTIIVGDVSPQKLVRTRMAKSVLDAGWGQLKTMLAYKCAHAGIVFRVVNEAYTTQTCSCCGALPASRPRGIAGLGIREWICECGVTHDRDVNAARNILALGHERPGEGIPGV

SEQ ID NO: 2391 - protein, 512 aa, Unknown
  Description of Unknown: uncultivated organism sequence
  Category: MG81 effectors
  Description: MG81-674 effector
MPTKQKEDSNRCVLTLPLLTEPWQEHIIEKRFKIIEHLKNQLISIELRKLKKLQRTKAYKNLIKQIESVPKSERTALYKERNKMLKDAGFSQYTFMDDMAGKKSLMQKHFESHINVQIAHKAAIDVWSSFEKFLFGTGQIVHYQKRGTLSSVASKSPKTGMFYYSDENIFKWSGGGTKPKGGIILCLRVASVKTNYEKEMVANNEIKYYRVVRKWMKTKYKYYLQITFAGKPADKHREISTGRVGIDIGTQTIAIASDKSVKLLELADKVNKNHIKKCELQRKLDRSRRYTNPDNFNPDGTVKRGTKGHKLKWNKSKHYIEIAGKIRELERKNADIRRYQHTCLANDILAMGNQIYIEPMNYKGLQKRAKETQVDEKGRYKKKKRFGKSLANKAPAMFVTILKTKAEQHGGEVYEVDIMSYRASQCDHTTGEYTKHGLNDRWRILGNGDKVQRDLYSAFLIKNSNKTHDEIDLDKCSKTYDNFKKLHDTEIENIRNEVKLRERKNISSYGIA

SEQ ID NO: 2392 - protein, 512 aa, Unknown
  Description of Unknown: uncultivated organism sequence
  Category: MG81 effectors
  Description: MG81-675 effector
MPTKQKEDSNRCVLTLPLLTEPWQEHIIEKRFKIIEHLKNQLISIELRKLKKLQRTKAYKNLIKQIESVPKSERTALYKERNKMLKDAGFSQYTFMDDMAGKKSLMQKHFESHINVQIAHKAAIDVWSSFEKFLFGTGQIVHYQKRGTLSSVASKSPKTGMFYYSDENIFKWSGGGTKPKGGIILCLRVASVKTNYEKEMVANNEIKYYRVVRKWMKTKYKYYLQITFAGKPADKHREISTGRVGIDIGTQTIAIASDKSVKLLELADKVNKNHIKKCELQRKLDRSRRYTNPDNFNPDGTVKRGTKGHKLKWNKSKHYIEIAGKIRELERKNADIRKYQHTCLANDILAMGNQIYIEPMNYKGLQKRAKETQVDEKGRYKKKKRFGKSLANKAPAMFVTILKTKAEQHGGEVYEVDIMSYRASQCDHTTGEYTKHGLNDRWRILGNGDKVQRDLYSAFLIKNSNKTHDEIDLDKCSKTYDNFKKLHDKEIENIRNEVILRKRRNISSYGIA

SEQ ID NO: 2393 - protein, 352 aa, Unknown
  Description of Unknown: uncultivated organism sequence
  Category: MG81 effectors
  Description: MG81-676 effector
MKTLKLRIKDKNLKVLDQLASEVNFVWNYVNDLGFKYLKRTGEFLSSYDIDKYTKGASKECGLHSQTIQAISAELVTRRKQFKKAKLKWRVSNKKSARRSLGWIPFKKVAIKYADGYVQYGKHQFKLWDSYGLSKYNVKTGSFVEDSRGRWYVCLVVDNATTIKSKGKTSIGIDLGLKDLATCSDGLKLKAPKIYREYEQKLGIAQRAKNKNRVRSVHAKIKNIRQNMLHQFTRKLVNEHAMIIVGNVNAKALAQTKLAKSVLDASWTTLRTMLKYKCENARVLFEEVNEAYTTQTCSCCGSRLSSPKGRTGLRIREWQCMECGTLHDRDINSALNILALGHERLAVGIPVL

SEQ ID NO: 2394 - protein, 513 aa, Unknown
  Description of Unknown: uncultivated organism sequence
  Category: MG81 effectors
  Description: MG81-677 effector
MPYGQKSKTDTFILTLPLITNSHDEAVLYSNFEKYCKAYNWLVQKTTEMWHQVRKTRRYRELVSAIANTAPKSKERKALYKKRTELLESYGFTSVLFEKKLKAYAKYYHLHSAISQKIAARVWDAWYKFFYKNGKSVHYKKLDDFVSFAAKTNGTGIQFLDDNGLYIKFRGRCIPVKLRKGNTAWYQQEALKRKVKFCIIKREMIRGRWRYFVQLALDGYPPIKCDGNGVAKHPVEPGHIGIDIGTQTIAFSGKDVCDLRVLAPSAIAEARNGLTKEIARIMRQMDRSRRAMNPQYFNENGTVKRLKRKNGHKQIRHWNYSKNYYRLLHRLRDLNRKLAAVRKTEHYILANEMLTYGNEFYVEDMNYKALQKRSKKTKINPKTGRAYTKKRFGKSIGRCAPALFITILGQKASRYGGSVIKVSTFETKASQFDHTDDSYTKKKLSQRFAKLSNGTVVQRDMYSAFLLTHLDESLQGYDKEAIDKDFQQFMKLHNETKERLQNSHEWLPASVGF

SEQ ID NO: 2395 - protein, 386 aa, Unknown
  Description of Unknown: uncultivated organism sequence
  Category: MG81 effectors
  Description: MG81-678 effector
MAGDIPPNNDDQLNINTLYVHTTMNIQIKTLSVRIKDKHAAVLRQMAFEVNQIFNLANEITSAAYSNAGFFGAQKPQWLSAFDVQKPLLKERKERGYTIPSHTVQEIAAIHGKARKQFKRSRLRWRVSGGSRRSLGWVPFKIGSAVWKNGAVRFAGRIFNVWDSYGLGGFKFRAGSFSEDSRGRWYFNVCVEVETVPSTATSAVGIDLGLKDYATPSEGDPLIAGRFYRDLEPALGKAQRANKKARVRAIHAKIKNRRKDALHKYSTALVSSHAAIFVGDASSKKLVKTKMAKSILDAGWFMLKTQLEYKAIARSVVFEVVNESYSTQACSCCGAISSNSPKGRAGLRIREWTCCECGTTHDRDVNAAKNILAAGHRRLAVGIPFL

SEQ ID NO: 2396 - protein, 578 aa, Unknown
  Description of Unknown: uncultivated organism sequence
  Category: MG81 effectors
  Description: MG81-679 effector
MAFGRKESTPSFVLTLPLDINLNEQNYLYKEFKKCGTIYNQLVSATTKMWHQLHKTHEYRALMAAITKAAPDSKELKALLNQRQNMIHQFGFSEGAFHKMVAPYAKHFAINSHVAQKIASAVWTAWKNFFFSKGKVVHYKKLENVTSISGNNNATDIALRPANLTTSIIKSTKDKKKKAIEQRYYKAYGQPDPKDDKNVILPDAVIPQMEVDIVAAVAKVKLSIGEGSLRIVYSDHEFPVVVRNPNTQTGRYQQEALKCGVKYCRITRKWVRNKWKYYAQLVLEGYPPVKCDSNGVMRHPVNQGRVGLDIGTQALAISGSDICDLRVLAPSARAQAKSLVNEIACTMRAMDRSRRATNPKYYNPDGTIKRLKRKHGQKQKRDWKYSKHYYRLRAKLRDLNRRLADIRKMEHNALANELLQHGNEFIVEDMDYKALQKRSKKTKINAKTGRAHTKKRFGKSLSRCAPAKFITILTNKAVRNGGNVIKVDTFETKASQFDHTDESYTKKKLSERMAHLSSGEVVQRDLYSAFLLEHIDTETLKYDIEALKAAFPAFLKMHENTKERLQEAESYLPASVGF

SEQ ID NO: 2397 - protein, 578 aa, Unknown
  Description of Unknown: uncultivated organism sequence
  Category: MG81 effectors
  Description: MG81-680 effector
MAFGSKNSTPSFVLTLPLDISLNEQNYLYKEFKKCGVIYNQLVSATTKMWHQLRKTRKYRELMAAIAKAVPDSDEQKTLFKQREKMLKEYRFSENAFHKLVVPYAKHFAIHSHVAQKVASAVWTAWEGFFFSKGKAVHYKKLEDVTSISGKNNATGIVLRPANLTTSNIESAKRKAQKAVEKRYDDMYGRPDPKDDKKVVLPDEVKPQMEAEIAAAIAKIKPTIGEGNLRIVYGKHEFPVVLRNPKTQTGKYQQEALKCGVKYCRITRKWVKTKWKYYAQFILEGYPPTKCDSNGVMKHPVNQGRIGLDIGTQTLAISGKDICDLRVLAPSARAQARGLTNEIARTTRAMNRSRRATNPQYFNSDGTIKRLKRKHGHKQRRDWKYSKRYFRLKAKLRDLNRRLGDIRKMEHNILANELLEHGNEFVVEDMNYKALQKRSKETKVNPKTGRAHTKKRFGKSLSRCTPAMFISILNKKANRYGGSVIKVDTFETKASQFDHTDESYTKKRLSERMAHLSSGEVVQRDLYSAFLLEYIDTESLEYNTKALNSAFPAFLKMHENTKERLQEAGSYLPASVGF

SEQ ID NO: 2398 - protein, 536 aa, Unknown
  Description of Unknown: uncultivated organism sequence
  Category: MG81 effectors
  Description: MG81-681 effector
MDADEYKKLLKKFHKLSDRHILVAEADMSYPDVQKVVNLSDRIRKAGNELVSLMKKNYEQLMRTKKYRKLLQLYGSTEDKKKRKTYAGQLNEMQEQYNLTKESCRTLMIPIGKKYGIDAIFALTKAEDVWHGVEKCLYGNGKTLHFSKYGDLPCIRAKQINRGIPMSVKNDELKFKLGKLVFGIQVKDRFQTDEVNAVLDYLASPETTDRKAVQTLLEEACCISTYRPCYATLVPKFIRGKYRVYLHLTIEGRAKPKYDRFGNPRHKYGNGIVGADIGTQTVAYTSDTETGLKNLSERGNSIQTSERLERLYYRAMNRSRRATNPENYNADGTIKKGKKKWTYSRHYKKLKAKHAELCRINATNRQLAINEDVNHLRCLGDTFVTEPKNAARLMKRAKETTVNNKGKINRKKRFGKSVKNRCPGGFQAAVENKFKTSGGTYIEVPNNYRASQYDHTADDYIKKKLSDRMYKLADGTLVQRDWYSSFLLYCYNYRTNGIDKKKCAAEFKKCYSMEKDFIEWIKTNKIKVLNSGIKIA

SEQ ID NO: 2399 - protein, 349 aa, Unknown
  Description of Unknown: uncultivated organism sequence
  Category: MG81 effectors
  Description: MG81-682 effector
MLLTYRYRLKDGSRARKRELRRMARAVNRVWNYCNEAQLHALKHNKRWPRAFDLNNLVAGSSKLLGLQSHTIQAVCEKYAASREAKRKAKLRWRGKRSLGWVPFKASGIKQDGAGWVYLKRRFPCWLHRALPDGGAIKYGSFSEDACGNWFINIVVELPDVEQSDDGADIGIDLGLKDLAALSTGEKIENPRHLSKLAAKLARAQRANKKKLAARTHRKIARARADHLHKASRRITDAARVIVVGDVSSTKLVKTDFARSVLDAGWSSFKEMLRYKATARGASFVCAAEHGTSRTCSCCGDTASGPKGIAGIAVREWTCSNCGASHDRDVNAARNILRVGLNTLKGAPL

SEQ ID NO: 2400 - protein, 562 aa, Unknown
  Description of Unknown: uncultivated organism sequence
  Category: MG81 effectors
  Description: MG81-683 effector
MSRWNKDIEVGERCVLTLPLNCHPRDTRFLDQVFQIENKLKNQLIEWYKTQLNEMTRTRLWREASQALADLHTEYGPDMKLLAELDEKAKKKPLSKTKEAKRVQLRQKAKEFQAKQKPLYETRNGMIRKYEFSRGDFEKRMAKYRRSYTDFVGSMVAQRLADDVWDMFQSYLYGKGKAIRFSGINKFLTIEGKNNSANIVFDRKAMKVFIGQGRHKTGIRVKRSRKDPCGYEAEALSREICYCRITRKAYPEGWRYFLQLVLKGAPPVKAKPDTGELLHPMGEGRVGMDIGPQTLAYCGEDVLDLVELAPGAQNLQEEIRRINRAMDRSRRATNPGMFDKAGQIIPGNRLPRELLDSHGKRKWVKSKQYREMERHRRYLYRKQADLRKAKHQQLANKLLAAGDRFYVEDMSWRALSRRSKQARKNKKGKNLSKKRFGKSIANKSPGAFLSILEKKVLAQGGSFYRINIWKARASQFHHMTGQYIKKKLSQRVDILEDGSKVQRDLYSAFLIMHSNKALDGFLVSSCNRDYPKFLQMHNKAMAALAASDKPLPSSMGVRRKAA

SEQ ID NO: 2401 - protein, 512 aa, Unknown
  Description of Unknown: uncultivated organism sequence
  Category: MG81 effectors
  Description: MG81-684 effector
MPTKQKEDSNRCVLTLPLLTEPWQEHIIEKRFKIIEHLKNQLISIELRKLKNLQRTKAYKNLIKQIESVPKSERTALYKERNKMLKDAGFSQYTFMDDMAGKKSLTQKHFESHINVQIAHKAAIDVWSSFEKFLFGSGQMIHYQKRGTLSSIASKSPKTGMFYYSDENIFKWSGGGTKPKGGIILCLRVASVKTNYEKEMVANNEIKYYRVVRKWMKTKYKYYLQITFAGKPADKHREISTGRVGIDIGTQTIAIASDKSVKLLELADKVNKNHIKKCELQRKLDRSRRYTNPDNFNPDGTVKRGKKGHKLKWNKSKHYIEIAGKIRELERKNADIRKYQHTCLANDILAMGNQIYIEPMNYKGLQKRAKETQVDEKGRYKKKKRFGKSLANKAPAMFVTILKTKAEQHGGEVYEVDIMSYRASQCDHTTGEYTKHGLNDRWRILGNGDKVQRDLYSAFLIKNSNKTHDEIDLDKCSKTYDSFKKLHDKEIENIRNEAKLRERKNISSYGIA

SEQ ID NO: 2402 - protein, 537 aa, Unknown
  Description of Unknown: uncultivated organism sequence
  Category: MG81 effectors
  Description: MG81-685 effector
MISNEEYKKLLKQFHKLSDRHILVVETDMSSSGIQKVIKLSDKIRKAGNELVSLMKKNYDQLMRTKKYRKLLKLYGSTEDKKKRKDLAEQLNKMQKQYNVTWDYCRTAMIPIGKKYGIDAVFALTKAEDIWRGIEKCLYDNGNTIHFSKYGDLPCIRAKQINRGIPMSVKDNKLQFKLGKSAFGIKINDVFQTDEVNAILNYLAEPEIVDNKAIQTLLDEAYCIDTYRPCYATLVPKLIRGKYRVYLHLTIEGKAKPKYDRFGNPRHRFGRGIIGADIGTQTVAYTSDTEIGLKNLAERGNSIQKSERLERLYYRAMDRSRRATNPQNYNKDGTVKKGRKSWKYSNHYKKLKAKHSELCRINAINRQLAINEDANHLRSLGDVFITESKNASKLMKRAKETTVNSKGKFNKKKRFGKSIKNRCPSGFQTTVEKKFKVSGGTYIEVPNNYRASQYDHTIDDYIKKKLSDRMYNLADGTLVQRDWYSSFLLYCYNYKTETIDKDKCFLKFEDCYNKEKALIEWIKANKIKILNSGIKVA

SEQ ID NO: 2403 - protein, 512 aa, Unknown
  Description of Unknown: uncultivated organism sequence
  Category: MG81 effectors
  Description: MG81-686 effector
MPTKQKEDSNRCVLTLPLLTEPWQEHIIEKRFKIIEHLKNQLISIELRKLKNLQRTKAYKNLIKQIESVPKSERTVLYKERNKMLKDAGFSQYTFMDDMAGKKSLMQKHFESHINVQIAHKAAIDVWSSFEKFLFGTGQIVHYQKRGTLSSIASKSPKTGMFYYSDENIFKWSGGGTKPKGGIILCLRVASVKTNYEKEMVANNEIKYYRVVRKWMKTKYKYYLQITFAGKPADKHREISTGRVGIDIGTQTIAIASDKSVKLLELADKVNKNHIKKCELQRKLDRSRRYTNPDNFNPDGTVKRGTKGYKLKWNKSKHYIEIAGKIRELERKNADIRKYQHTCLANDILAMGNQIYIEPMNYKGLQKRAKETQVDEKGRYKKKKRFGKSLANKAPAMFVTILKTKAEQHGGEVYEVDIMSYRASQCDHTTGEYTKHGLNDRWRILGNGDKVQRDLYSAFLIKNSNKTHDEIDLDKCSKTYDNFKKLHDKEIENIRNEVILRKRRNISSYGIA

SEQ ID NO: 2404 - protein, 347 aa, Unknown
  Description of Unknown: uncultivated organism sequence
  Category: MG81 effectors
  Description: MG81-687 effector
MIQYQLKLRMCKSQEQKCEQFLYHLSSVWNWAVRKIELNAKDHIYFSKMEFQNFLSNHSEKMGIPSHTLQGVICTAHDAWKRCFKKIGGKPKLKGMRNKMSSIPFPDPIKAPKGNRINLPALGSVRFHKMELPDGKIKCGRIVKRTSGWYLCLFIDAQPKVIERTGYGVIGVDGGFKDLLTLSTGEKISHPRELEVAAERLAQAQRGHDTKLAARIQEKIANRRKDRNHKLSRRLIAENVVIKFSADNHKAVARRFGKSVASSGHSQLQRMLAYKSPQSGTQYFEIAPKDSTKTCWVCGEPTGPTGLAGLSVRQWRCTTCGTFHDRDQNAAVNTLIAAAGCAVEVCI

SEQ ID NO: 2405 - protein, 369 aa, Unknown
  Description of Unknown: uncultivated organism sequence
  Category: MG81 effectors
  Description: MG81-688 effector
MTEDIVDQEGESGVRQCGARSALTVMRFRLRDKHARELSSQGRAVNFVWNYCNETQQKTARAGRKWLTAVDLQRLTAGASKDLDLHAHTIQKVCQQYDRSRKQHRKPWLRFRGRKSLGWVPFNQGHVTVVAPGKLKFRGVIYETMHWRDLPDGAVIRAGSFNQDSRGRWYINLPIEMPAEAFAKSGGSIVGIDLGLKDLATLSTGEKIENPRHLAKHAERHAKAQRAGKTKLARSIAAKVANCRKDYLHKASARIALAHGTIFVGNVSSERLARTRMAKSVLDAGWSTLRTQLSYKALRHGGKMIEVDERNTSRSCSVCGADSGPKGIAEIGIRRWECEVCGESHDRDVNAALNIVRVGLDTLVEGASL

SEQ ID NO: 2406 - protein, 362 aa, Unknown
  Description of Unknown: uncultivated organism sequence
  Category: MG81 effectors
  Description: MG81-689 effector
MINYQLKLKLTKYQEQQLESWLPILTSIWNWTIRKIELDAKDNIYYNSKFDFVNLLVNHSEKLGVSSHTMMCTTMTAYNLYQQYIKKKCGKPKFKGQRNKLNSILFPDIIKQPQNNKIQLRVIGKIKYHKQQIPEGNIKCVRIIKKVSGWYAVLTIDTKPKKISIISNNKVGIDPGFKHLLTLSNGDKIEHPREFEINAERLAQAQRGHNKKLAAIINEKIANQRKNRNHKLSRKLVSENELIVFSKDNHKNVAKKFGKSVSSSGHYQLQKMLEYKCRTDGRQYIEVDCKFSTMTCSTCNARTGPTGWEGLKVRNWECTECGTLHDRDINAAINTLNSGLGISHENTVKTEIQKTSNEWGNI

SEQ ID NO: 2407 - protein, 537 aa, Unknown
  Description of Unknown: uncultivated organism sequence
  Category: MG81 effectors
  Description: MG81-690 effector
MISDEEYKKLLKQFHKLSDRHILVVETDMPYSDVLKVMILSDKIRKAGNELVSFMRKNYDQLIRTKKYRKLLKLYGSTKDKKKRKDLADQLNEMQKAYNVTWDHCRRSMIPIGRKYGIDAVFALTKAEDVWRGIEKCLYGNGKAIHFSKYGELPCIRAKQINRGIPISVKDDRLQFKLGKTAFGIQVNDRFQQDEADAVLTYLAEPEIVDNKAVNTLIEDAYYIDTYRPCYATLVIKMIRGKYRVYVHLTIEGKTKLKYDKHGNPRHKYGKGVIGADIGTQTVAYTSDTEVGLKNLSERGNSIQTSERKERLLYRAMDRSRRAANPQNYNEDGTVKKGRKTWKYSNHYKKLKAKHSELCRINAVNRQLAINEDANHLRSLGDTFVTEPKNASKLMKRAKETAVNDKGRFNKKKRFGKSIKNRCPSGFQTTVEKKFKTTGGTYIEVPNNYRASQYDHTVDDYIKKKLSDRLYKLQDGTEVQRDWYSSFLLYCYDYKIQKIDKNKCITQFDNCYKKEKALITWIKAHKIKVLNSGIKIA

SEQ ID NO: 2408 - protein, 578 aa, Unknown
  Description of Unknown: uncultivated organism sequence
  Category: MG81 effectors
  Description: MG81-691 effector
MAFGSKNSTPSFVLTLPMVIGFNEQDYLNKEFKKCGVIYNQLVNATTKMWHQLRKTRKYRELMAAIAKAAPDSDEQKALFKQREKMLKEYRFSEDAFHAMVVPYAKHYAINSHVAQSIATAVWTAWSSFFFDKGKEVHYKKLEYVSSISGKNNATGIMLRPANHTTNVINSAKTKAKNSIEKKYFAAYRKPDAKEGEEVVLPDEVKAQMEKEIAAATAKVKTSIGKGKLHITYGDYTFPVTLRNPDTQTGWYQQEALKCGVKYCRIIRKWVSTKWKYYAQIVLEGYPPIKCDNNGVAKHPVKQGRVGIDIGTQTIAFSGKDVCDLRVLAPAARAQAKSLVNEIASTLRAMDRSRRATNPKYYNPDGTIKRLKRQHGQKQKRKWKYSKRYYRLRAKLRNLYRKLADIRKMEHNILANELLTHGNEFVIEDMNYKALQKRSKETKINSKTGRAHTKKRFGKSLSRCAPAMFISILGKKANRYGGSVIKVSTFETKASQFDHTDESYTKKKLSERMARLRNGDIVQRDLYSAFLLEHIDTESLQYNMETLNSAFPAFLEMHENTKRRLQAVGSSLPASIGF

SEQ ID NO: 2409 - protein, 353 aa, Unknown
  Description of Unknown: uncultivated organism sequence
  Category: MG81 effectors
  Description: MG81-692 effector
MKTLKLRIKDKHCKVLDQLASEVNFVWNYVNDLGFRHLKRKGEFLSAFDIAKYTKGTSKECNLHSQTIQAVTEELVTRRKQFKKAKLKWRVSNKKSARRSLGWIPFKKVAMKYANGYVQYGKHQFKLWDSYGLSKYTLKTGSFVEDSRGRWYVCLVVESPKQDKSTATKAIGIDLGLKDIATCSDGTVISNPKFYRKYEQKLGIAQRARNKKRVRALHAKIANSRKDHLHKASTKLVNENALIIVGDLSAKKLVKTKMAKSVLDTGFSALKTMLKYKCENAGVLFEEVQEAYTTQICSCCGEITSSSPKGRTDLGIREWECMSCGTAHDRDINSALNILALGHKRLAVGITLF

SEQ ID NO: 2410 - protein, 913 aa, Unknown
  Description of Unknown: uncultivated organism sequence
  Category: MG81 effectors
  Description: MG81-693 effector
MSYLAAKYIDLGKGVYHFTMKDKLDMLNKNEAVTDLRFGIVSEKYEKGITSFDYERIKAEEELDRNIAAYVTFAADIFAKSVIKSDYRTKKDNNSDVLQYSDKEFRNSEVIRDNAEKNILQYWGGYSRWGTENSKLPENNKVSDFGKLDVSDLCIDIKKHLAGIRNSSVHYTTKIKNESAADGSNVKILFEKDLADINIIYADKYYSNNVWMFYSLEDINKLIAFLYKEKRVIRQVQIPSFSRILKRKAMQDVINEIFKDDFDENIVNPELKEKYRNSLYFMLKEIYYNAFIIQPELKEKFKDKIKTMKSELYNKLKTIDKKEYKALYCMLSNEESALKNFADRIYSVDGDNVSFADICKILMTDYNMQNQEKKNIESMEQKKKNKGKDENYKHFPLLLHKVLKELFIEYLKQTHELEFLRNNICIKSDVTMESFESQIKGVEIYKDLKEKIDKNNSLLDWYVIAHFLMPKQLNHLIGNIKNYIQFATNIDKRAESVKNLTESGMVKRIQYYDDIVRTLEFSAQYIGKISNNINDYFNSEDEYVSFLSKYVGFINDKSEDVLTELKDFCREKINNGSQIIGIYYGGDNVIINRNVIYAQMYSNAEVFSNIYKKVTKNDIINYYEKQNDLKDVFKSGVCQNEDEQRSLCEFQQLKNRIELTELSTYADMVNDFMAQFVEWAYLRERDLMYCQLGIHYIRLFYSDNVLDEKYHKLSDNVIDIEEGALLYQIVAMYDYELRIFETDNSGNAKRIGQGGPGKSIPVFLKKYCNVTDVYECGLELFEDINQHEHIIRFRNDIAHMRYMSNQAMNIMSIVSNIYKSFFVYDTKLKKSISLVFKNILMRYGVIADLVFSYNNKNQSIKDDMDINIINIKNLKSDKYVYKIVNEDIVKQVEIEIRNQVFLEQLHNLLYFSR

SEQ ID NO: 2411 - protein, 392 aa, Unknown
  Description of Unknown: uncultivated organism sequence
  Category: MG81 effectors
  Description: MG81-694 effector
MSSEPPPEVDGANCIRTLRLKLKPEAYAWLNAAAVEINRVWNFANETSAKAARPFAGPPKWLSAYDLDKLTAGATEYFERIGSASIQRVNAEFATRRKQVKKTKLRWRSSRGSRRALGWLPFKAVQLKRKGKSLRFSGKAFRVFEQQRLLGVSWKSGCFTQDAVGDWWLNLAVEVRLEPPVAQNEEVGLDLGLKDTVATSDGEKLEAGHFYRNIEQQIAQAQRRGHKRQAKRLHRRAARRRKDALHKFSRMIVNRYQRIIVGDVSSARLVKTRMAKSVLDAGWGMLKAQLQYKSQQASRSVFIVSERNTTRACSNCRALTGPTGLDMLAVRTWVCSGCGGTHDRDVNAAKNIRFAVRCSPSLSGNESSPSHAPPSQAPCLREARNSALTAVA

SEQ ID NO: 2412 - protein, 556 aa, Unknown
  Description of Unknown: uncultivated organism sequence
  Category: MG81 effectors
  Description: MG81-695 effector
MAFGSKNSTPSFVLTLPMVIGLNEQDYLNKEFKKCGIIYNQLVNATTKMWHQLRKALFKQREKMLKEYRFSEDAFHAMVVPYAKHYAINSHVAQSIATAVWTAWSSFFFDKGKGVHYKKLEYVSSISGKNNATGIMLRPANHTTSVINSAKTKAKNSIEKKYFAAYRKPDAKEGEEVVLPDEVKAQMEKEIAAATAKVKTSIGKGKLHITYGDYTFPVTLRNPDTQTGWYQQEALKCGVKYCRIIRKWVSTKWKYYAQIVLEGYPPIKCDNNGVAKHPVKQGRVGIDIGTQTIAFSGKDVCELRVLAPSARAQAKNLVNEIASTHRAMDRSRRATNPKYYNPDGTIKRLKRQHGQKQKRKWKYSKRYYRLRAKLRNLYRKLADIRKMEHNILANELLVHGNEFIVEDMNYKALQKRSKETKINPKTGRAHTKKRFGKSLSRCAPAMFISILGKKANRYGGSVIKVSTFETKASQFDHTDESYTKKKLSERMARLRSGDIVQRDLYSAFLLEHIDTESLQYNMETLNSAFPAFLEMHENTKRRLQAVGSSLPASIGF

SEQ ID NO: 2413 - protein, 512 aa, Unknown
  Description of Unknown: uncultivated organism sequence
  Category: MG81 effectors
  Description: MG81-696 effector
MPTKQKEGGNRCVLTLPLLTEPWQEHIIEKRFKIIEHLKNQLISIELRKLKNLQRTKAYKNLIKQIESVPKSERTALYKEKNKMLKDAGFSQYTFMDDMAGKKSLMQKHFESHINVQIAHKAAIDVWSSFEKFLFGTGQIVHYQKRGTLSSVASKSPKTGMFYYSDENIFKWSGGGTKPKGGIILCLRVASVKTNYEKEMVANNEIKYYRVVRKWMKTKYKYYLQITFAGKPADKHREISTGRVGIDIGTQTIAIASDKSVKLLELADKVNKNHIKKCELQRKLDRSRRYTNPDNFNPDGTVKRGTKGHKLKWNKSKHYLEIAGKIRELERKNADIRKYQHTCLANDILAMGNQIYIEPMNYKGLQKRAKETQVDEKGRYKKKKRFGKSLANKAPAMFVTILKTKAEQHGGEVYEVDIMSYRASQCDHTTGEYTKHGLNDRWRILGNGDKVQRDLYSAFLIKNSNKTHDEIDLDKCSKTYDSFKKLHDKEIENIRNEVILRKRRNISSYGIA

SEQ ID NO: 2414 - protein, 512 aa, Unknown
  Description of Unknown: uncultivated organism sequence
  Category: MG81 effectors
  Description: MG81-697 effector
MKKSSTDTCCLTLPLKLEKWQEDRLAKRFEIARQLYNTLVHAELKRLVQIKRTAEYLENEQKIRALDRNNPADRAKLQELYKEQRKSLKTAGFTDYSFTTDMGKYYKHFRDNIGSSVAVHGIAPQVWAAFDKVLFKKGGKKVHYKKPGEVNSVQGYSRTGKSGGTEIMFRGPYIEWKGLKLPLKVSPDNAYETDMLQRRVKLVRLVRRPGKRRDRWYAQLVLEGKPAIKADPVTGKAVRPIGSGPVGLDIGPQTLAYSAAGVAGLVELADRVQNIEQEKRCLQRKMDRSRRAANPDNYAEDGTIRRGVKLTHNKSKRYRRSQQELKYLQHRQAEMRKLQHIQLANHLLSLGDHFYVEKMEWSSLTHRAKKTVISEKTGKPRSKKRFGKSIANKAPAMLIEILRQKCKSLGLPNVVEINPADIKASQYNHLTGEYVKKSLSRRWNEMQDGEHLQRDLYSAFLLQHYDSMSKALDLDSLARDYPAFVQYHHREIERLHALPKTPSSMGIRRSIA

SEQ ID NO: 2415 - protein, 512 aa, Unknown
  Description of Unknown: uncultivated organism sequence
  Category: MG81 effectors
  Description: MG81-698 effector
MKKCTTDTCCLTLPLKLEKWQEDRLAKRFEIARQIYNTLVRAEFKKLNELERTPEYKKILEQIHSLDWKDSGNRQRLNDLYRERNQILKNAKFTEYGFKSDMKFYYKHFSDNIGSCVAVHGIAPQVWAAFERYLFKPEGKKVHFKRFGDVHSLRGYSKAGESGGAEITFCGTHIRWKNLELPIKLSPDNAYETEMLSRRVKYVRILRKPGKSKDRWYVQLSLEGKPAIKYDRNAGEIKHPVAHGAVGLDIGPQTLAYSAETTADLVELADQVQNIEQEKRRLQRKMDRSRRSTNPGNYNTDGTIRRGVKLTRNKSKAYCKLQRQLAYLQHTQAETRKRQHTELANYLLSLGDCFYVEEMKWSSLAHRAKETAVSEKTGRFKQKKRFGKSIANKAPSTLIGILQQKCESLGLPGIIYVPLSAKASQYNHLTGEYTPKPLSQRWNTMPDAQRVQRDLYSAFLLQHFDSQAGIYNLQSLQRDYPQFLQYHDQSIRRLSEMPKTLSSMGIRKSIRA

SEQ ID NO: 2416 - protein, 357 aa, Unknown
  Description of Unknown: uncultivated organism sequence
  Category: MG81 effectors
  Description: MG81-699 effector
MIKTLRVRVKDKHAALLRCMAYEVNQIFNKANAITAERACVCSDFGPCKPSYPTAFDLDKSVKKEPDYHIGSATVQEILAYHAKARKQFKRSKLRWRCSSGPRRSLGWIPFRVGQSKYKAGQIVFARHHFKIWDSYGLSGVEFKSGSFSEDARGRWYFNAAVEVAVEPFNGGGDIGIDLGLKDVATCSDGTKLPAERFYRGMENKLKIAQRTNKKARVRAIHAKIKNRRKDMLHKFTTELVKKNAAIFVGDVSSTKLAKTKMAKSIYDASWGLLKTMLSYKAIGYSAWFEDINESYSTQLCSACGEIPASSPKGRAGLGIREWTCSCCGAVHDRDVNAALNILAAGRCRLAGGIPAL

SEQ ID NO: 2417 - protein, 358 aa, Unknown
  Description of Unknown: uncultivated organism sequence
  Category: MG81 effectors
  Description: MG81-700 effector
MQTVTYKYRVKDRSARKTLARHAKACNQVWNYCNAFQRDIEARYRAGAPKRRWPSAFDLAKLCKGVGKELGIHQQTVGTVCDQFAKSRDKAKHSLRFRPSFGVKRALGWIPFQKQSRQIEGNSIWYLGKRYRFFSCKRRPLPDSAKGGAFVEDALGRWYVCFHVEVTERHPHGNGAIGIDLGLKSLAVMSDGQKIEAPRHYRQLEGKLAIAQRAHNKQRVRRIHAKIKNTRKDFLHKLSTTLADQNAIIAVGDVNSKQLAKTRMAKSVFDAGWSTFRTMLKYKSAGYVEVDEKFTTQTCSHCGALPPERPKGIAGLGIRAWECSSCGESHDRDVNAAKNILVLALSAERPVVESRIAA

SEQ ID NO: 2418 - protein, 550 aa, Unknown
  Description of Unknown: uncultivated organism sequence
  Category: MG81 effectors
  Description: MG81-701 effector
MGWKSKGRGGTLVDNEEKKEDGATCCLTLPLKLEKWQSDHLEKRFEIARQLYNTLVHAELKKKCQVERMPEYQEIMKMIDTASNQKEKWALEKKRKAFLEENGFSRNAFKADMEKYYKHFNDNIGANVALHGITAQVWIAFDKVFVDNYKQKGKVHFKKPGELCSMQGYSQKKSGGKEIMFREDRIIWNQQGNRDRKKVKREFLLKLSPDNPYEAEMLKRHVKFVRILRKDGKTKPHWYAQLVLEGKPAVKRDPASGAPKHPIGHGVVGIDIGTRTLAYSTDKEVNLLELADRVQNIEQEKRRLQRKMDRSRRATNPENYNPDGTFKRGVKLTRNKSKRYKRIQHQYAMIQHHQADIRKQQHNELANYLLTLGDCFFVENMSYCDLVHRANKTEISEKTGRYKRKKRFGKSIANKAPAMLITMLKQKCQSRGLEGVKEVDTHVCASQYNHQTDTCIKKALENRWNIMPDGERIQRDLYSAFLLQHCRRDLPEYNRKELQKEFGEELYRVFDREALQRDYPQFVAYHHMTIQRLSELPHTIPSMGIRRSIS

SEQ ID NO: 2419 - protein, 534 aa, Unknown
  Description of Unknown: uncultivated organism sequence
  Category: MG81 effectors
  Description: MG81-702 effector
MGWKSKGRGGKRVKRSSTDTCCLTLPLKLEKWQSDRLEKRFEIGRQIYNTIVHAELKKLRKLERTQQYQEIEQKLENAKQEETKELWKKKRQLLDQNGLSENHFKADMKHYYPHFKDNIASSVAVHGIASQAWTAFEKVLLSKDGKMVHFKKKGELSSLRGYSQTGKSGGIEIIFRGSYVEWKGLKLPLKLSPDNDYETEMLSKRVKYVRILRQDGKTKPHWYAQLVLEGKPAVKRDPISGAPKHPIGRGVVGIDIGTRTLAYSADSKVDLIELADRVQNIEQEKLLLQRKLDRSRRATNPENYKPDGTIKKGVKLTRNKSKRYRRIQHQLAMIQHHQADIRKQQHNELANYLLTLGDCFFVENMSYCDLAHRANKTEISEKTGRYKRKKRFGKSIANKAPAMLITMLKQKCQSRGLEGVKEVDTHVCASQYNHQTDTCIKKALENRWNIMPDGERIQRDLYSAFLLQHCRRDLPEYNRKELQKEFGEELYRVFDREALQRDYPQFVAYHHMTIQRLSELPHTIPSMGIRRIIS

SEQ ID NO: 2420 - protein, 391 aa, Unknown
  Description of Unknown: uncultivated organism sequence
  Category: MG81 effectors
  Description: MG81-703 effector
MQPKDLTHSHVHSVTRTLRLKVKTESYAWLNTAACEVNQVWNWSAEVSEKAARPCTGERKWLTGFDLNNLSAGASEHFDKVGADTIQRVNGEYAEKRRIAKRYRLKWRTSRGPRRSLGWVPFKAANLKRKGRAVRFCGKTLRVFEPERLEGVQWKQGHFAQDAVGDWWLSLPIAVQVDDSVAPLEKVGIDLGLKEIAVTSDDARCEKGRFYRDIERKIAQAQRRGHRRQAKYLHRRAANRRKDALHKFSRQIVDQYQKIVVGDVSSTKLVKTRMAKSVLDAGWGMLRRYLQYKSQQAGRTFQIVNERNSSRTCSNCDALTGPQGVNGLRVRRWRCAACGASHDREVNAARNHLRRAELPASVRERASVFAGPPSRASRSRKAGLEPVRTVA

SEQ ID NO: 2421 - protein, 522 aa, Unknown
  Description of Unknown: uncultivated organism sequence
  Category: MG81 effectors
  Description: MG81-704 effector
MKRSSTDTCCLTLPLKLEKWQSDRLEKRFEIGRQIYNTIVHAELKKLRKLERTQQYQEIEQKLENAKQEETKELWKKKRQLLDQNGLSENHFKADMKYYYPHFKDNIASNVAVHGIASQAWTAFEKVLFSKDGKMVHFKKKGELSSLRGYSRAGKSGGVEIIFRGSYVEWKGLKLPLKLSPDNDYETEMLSKRVKYVRILRKDGKTKTHWYAQLALEGKPAVKRNSISGAPKHPVGHGVVGIDIGTRTLAYSTDSEVNLLELADRVQNIEQEKRRLQRKMDRSRRAMNPGNYKPDGSIKQGVKLTWNNSKRYKRIQHQYAMIQHHQADIRKQQHNELANYLLTLGDCFFVENMSYCDLAHRANKTEISEKTRRYKRKKRFGKSIANKAPAMLITMLKQKCQSRGLEGVKEVDTHVCASQYNHQTDTCIKKALENRWNVMPDGERIQRDLYSAFLLQHCRRDLPEYNRKELQKEFGEELYRVFDREALQRDYPRFVAYHHMTIQRLSELPHTIPSMGIRRIIS

SEQ ID NO: 2422 - protein, 511 aa, Unknown
  Description of Unknown: uncultivated organism sequence
  Category: MG81 effectors
  Description: MG81-705 effector
MAKCSTDTCCLTLPLRLEKWQEDRLAKRFEIARQINNTMVRAELKKLRAMEQSEPYKANQEKIQALDWKTQTDKQALKALYKERDKLLRDGGFSEYGFKSDIKNYYKHFNNNIGSNVAFHGIAPQVWAAFEKMLFKKEGKKVHFKKKGDIHSLRGYSAAGKSGGVEIIFRETYIEWKGLKLPLKLSPDNIYETQMLSYRVKYVRLLRKPGKRKDRWYAQLSLEGKPVIKYNPKTGEVRHPIGKGAVGLDIGPQTLAYSAATGADLVELANQVQNVEQEKRRLQRKLDRSRRATNPGNYADDGTIRRGIALTHNKSKRYLRTQQELKYLQHQQAEIRKRQHTELANHLLSLGDCFYVEKMVWTSLTHRAKETEISEKTGKIKRKKRFGKSVANKAPATLIGILQRKSAALGIPGVIEVPTSVKASQYNHQSGTYTPKPLSQRWNNMPDGERIQRDLYSAFLLQHYDPQTNTFDANSLHQDYPQFVQYHHDAVLRLYAMPKTPSSMGIKRSLR

SEQ ID NO: 2423 - protein, 343 aa, Unknown
  Description of Unknown: uncultivated organism sequence
  Category: MG81 effectors
  Description: MG81-706 effector
MPPSLMRTLRLKVRSEAYPWLNAAAIEVNAVFNYCNETSLKAATRTDLKRKWLTGFDLCALTAGATEYFDKIGADTIQSVCIHYAQKRKAAKKLKLKWRVSRGAQRSLGWIPFKAASLKRKGRGVRFAGKCIRVFERERLEGVKWQGGEFAQDAVGDWWLCLPVKVQADCSIAPQEEVGIDLGLKTIAVTSDGDRLEAGRWTHRYAEKLASAQRRGHKRQAKRIHRKIARCRADALHYFSRKMVDRYQKIVVGDVSSLKLVKTRMAKSVLDSGWGTLKRFLEYKCEHAARSFEVRDERYSTVTCSNCGALSGPREVNGLIVDHGNVATVESCMTETLIRLGIT

SEQ ID NO: 2424 - protein, 350 aa, Unknown
  Description of Unknown: uncultivated organism sequence
  Category: MG81 effectors
  Description: MG81-707 effector
MQTITIKLRLRDKHSAELRRQARAVNFVWNYCNETQQKAARDRRKLLTGFDLAKLTSGTSKMLDLHAHTISRVAIQYEKSRKQHRKLWLKWRGRKSLGWVPFNTGHVSFDGACLKFRGKVYEPMHLRDVLMPGVKIGAGSFNQDSRGRWYINLPVQAVTADSAPVARIGIDLGLKSLATMSDGSKIEAPRFYKTSETALATAQKRRKSKRTKAIHAKIANRRKDFLHKESARLAKTYGLIVVGDVSPNAIAKSRMAKSSLDAGWAAFKGMLSYKAIRHGGSTLEVSERYTTQTCSCCGSVGSSTRPKGIAGLGIREWSCEDCGTTHDRDVNAARNILRRGLATLAEGTPA

SEQ ID NO: 2425 - protein, 538 aa, Unknown
  Description of Unknown: uncultivated organism sequence
  Category: MG81 effectors
  Description: MG81-708 effector
MNNEEKEKDGATCCLTLPLKLEKWQSDHLEKRFEIARQLYNTLVHAELKKKCQVERMPEYQEIMKMIDAASNQKEKWALEKKRKAFLEENGFNRNAFKADMEKYYKHFNDNIGANVALHGITAQVWIAFDKVFVDNYKQKGKVHFKKPGELCSVQGYSQKKSGGKEIMFREDRIIWNQQGNRDRKKVKREFLLKLSPDNPYEAEMLKRHVKFVRILRKDGKTKPHWYAQLVLEGKPAVKRDPASGAPKHPIGHGVVGIDIGTRTLAYSTDKEVNLLELADHVQNIEQEKRRLQRKMDRSRRATNPENYNPDGTFKRGVKLTRNKSKRYRRIQHQLAMIQHHQADIRKQQHNELANYLLTLGDCFFVENMSYCDLVHRANKTEISEKTGRYKRKKRFGKSIANKAPAMLITMLKQKCQSRGLKGVKEVDTHVRASQYNHQTDTCIEKALENRWNVMPDGERIQRDLYSAFLLQHCKQGLPEYNRKELKKEFGEELYRVFDREALQRDYPQFVAYHHMTIQRLSELPHTIPSMGIRRIIS

SEQ ID NO: 2426 - protein, 356 aa, Unknown
  Description of Unknown: uncultivated organism sequence
  Category: MG81 effectors
  Description: MG81-709 effector
MKTLHIRIKDKHAKALDALARDVNMVWNYCNDLSYKHLQRTGKFFSSYDLQKYTAGATKEGLSINSASVQMIGAELVTRRKQFKKAKLRWRTSFGSRKSLGWIPFRHDCIAYKNGQLRYAGQCFGLWDSYGLSQYKLGSGSFSQDARGRWYANICVEVPVFVGPIKPPELCECVGIDLGLKDFATMSDGVKVEAQRLYRCAEAKLAVAQRANKKARVKAIHAQIANRRKDALDKLSTKLVCENRAIFVGNVNASGLAKTNMAKSVLDAGWTSFRTMLSYKSIATGVLFDEVNEAYSTQTCSCCGTLPDSRPRGIAGLGIREWTCSECGAHHDRDVNAAKNILQRGHALLAVGIPVL

SEQ ID NO: 2427 - protein, 538 aa, Unknown
  Description of Unknown: uncultivated organism sequence
  Category: MG81 effectors
  Description: MG81-710 effector
MDNEEKKEDGATCCLTLPLKLEKWQSDHLEKRFEIARQLYNTLVHAELKKKCQVERMPEYQEIMKMIDAASNQKEKWALEKKRKAFLEENGFSRNAFKADMEKYYKHFNDNIGANVALHGITAQVWIAFDKVFVDNYKQKGKVHFKKPGELCSVQGYSQKKSGGKEIMFREDRIIWNQQGNRDRKKVKREFLLKLSPDNPYEAEMLKRHVKFVRILRKDGKTKPHWYAQLVLEGKPAVKRDPASGAPKHPIGHGVVGIDIGTRTLAYSTDKEVNLLELADRVQNIEQEKRRLQRKMDRSRRATNPENYNPDGTFKRGVKLTRNKSKRYRRIQHQLAMIQHHQADIRKQQHNELANYLLTLGDCFFVENMSYCDLVHRANKTEISEKTGRYKRKKRFGKSIANKAPAMLITMLKQKCQSRGLKGVKEVDTHVRASQYNHQTDTCIEKALENRWNVMPDGERIQRDLYSAFLLQHCKQGLPEYNRKELKKEFGEELYRVFDREALQRDYPQFVAYHHMTIQRLSELPHTIPSMGIRRIIS

SEQ ID NO: 2428 - protein, 352 aa, Unknown
  Description of Unknown: uncultivated organism sequence
  Category: MG81 effectors
  Description: MG81-711 effector
MKTLKLRIKDKHSAVLNQMACEVNFVWNYVNDLGFKHLKRKGEFLSAYDIAKYTKGTSKECNLHSQTIQAVTEELVTRRKQFKKAKLKWRVTNKKSARRSLGWIPFKKIAIKYANGYVQYGKHQFRVWDSYGLSQYSVKTGSFVEDARGRWYVCLVVESSKTVKITSTKAIGIDLGLKDIATCSDDTVISNPKFYRKYEQKLGIAQRARNKKRVRALHAKIGNCRKDYLHKSSTMLVKKNALIVVGDLSAKKLVKTKMAKSVLDTGFSALKTMLKYKCENAGVLFEEVNERFTTQICSCCGEITTGSPKGRADLRIRVWECECGSINQRDLNSAKNILALGHKRLAVGISLF

SEQ ID NO: 2429 - protein, 350 aa, Unknown
  Description of Unknown: uncultivated organism sequence
  Category: MG81 effectors
  Description: MG81-712 effector
MIVVYRYRVKSLNGLLNKQSRAVNYVWNFCNDTQKHALKWGKKWPTGFDLNVLTTGSSKELGIHSGTVNATCEQYAKSRSQHRRPFLRYRGRRSLGWVPLKGRDLKREGQAFRFAGNTFRVFNSRPLPEGKIKDGTNFAQDARGNWFLNIVIEVADVPARPIRTGVGVDLGLKDFATLSTGEKLPNDRFGRCAAEKLAKAQRARKHKRHIAKLHAKVANARADFQHKLALDLVRRFDYIAVGNVSAAKLAKTRMAKSVYDASWSSFRDRLRYKAIAHGATFEEVNESGTTQSCSACGSKDCTTRPRGISGLRIREWTCSRCGVVLDRDTNAALNILRCGRASPAVGISCL

SEQ ID NO: 2430 - protein, 367 aa, Unknown
  Description of Unknown: uncultivated organism sequence
  Category: MG81 effectors
  Description: MG81-713 effector
MYQVLKLRIYRKHYVKLDKLSSAVNFVWNYVNDLCWQMWRRKRIFPSAYDIHEYTKGAGEELGLHSQTIQFIGEKHHQSRKQHKKVKLAWRTNRKDAKRKSLGWIPFKASAISHVKTYNTGKKALKSQVQLSCGKEKLILTVYDQYDLRRYNGFRTAEIVQDSCDDWYLCLLVKVEPKVCTATSEVGIDYGCKTAAICSNGDKLETKFTQQYAEKLATAQRAHKKKQARRINRKIKNKRADATHQFTGKLVKENRLIVAGNVKSSSFTSGKLAKSVYDANWFAINRQLEYKSRRAGCQFIKVDEKFSTQTCANCLQITNSSPKGVAGLGIREWICDCCGQLNDRDVNAAKNILRFGRETLAGGSPIL

SEQ ID NO: 2431 - protein, 349 aa, Unknown
  Description of Unknown: uncultivated organism sequence
  Category: MG81 effectors
  Description: MG81-714 effector
MLQVQLKLRPCKAQEQIYDQWLYNLASVYNFAVRKIELNAKDKIYFSKNDFQNLLANHGEKLGIPSHTIQGVLCTVHDAWKRCFKKTAGKPKLKGMRNKMSSIPFPDPIKAPKGNRITLPGLGSVRFHKQEISEGKIKCGRLIKRASGWYLCLFIDAEPNPIKRLAFGAIGIDPGFSNLLTTSDGEVIEHPRELEAAAERLGQAQRGHNKQLAARIQERIANRKKDRNHKLTTKLVSENVLIVWSKDAIKGIAKRFGKSVSSSSHAQIRQMLSYKMPKSGGTFIEVASKYSTKTCNECGNPTGPTGLAELSVRQWRCSACGAEYDRDVNAARNTLFAGAGCAHEELAYV

SEQ ID NO: 2432 - protein, 350 aa, Unknown
  Description of Unknown: uncultivated organism sequence
  Category: MG81 effectors
  Description: MG81-715 effector
MIVVYRYRVKSLNGLLNKQSRAVNYVWNFCNDTQKHALKWGKKWPTGFDLNVLTTGSSKELGIHSGTVNATCEQYAKSRSQHRRPFLRYRGRRSLGWVPLKGRDLKREGEAFRFAGNTFRVFSSRPLPEGKIKDSTNFARDARGNWFLNIVIEVADVHARPIRTGVGIDLGLKDFAALSTGEKLPNDRFGRRAAEKLAKAQRARKHKRHIAKLHAKAANARADFQHKLALDLVRRFDYIAVGNVSASKLAKTRMAKSVYDASWSSFRDKLRYKAIAHGATFEEVNESGSTQSCSSCGSKDSTTRPKGIAGLRIREWTCSVCGVVHDRDTNAALNILRCGRASPAVGISFL

SEQ ID NO: 2433 - protein, 358 aa, Unknown
  Description of Unknown: uncultivated organism sequence
  Category: MG81 effectors
  Description: MG81-716 effector
MTKTFSFRIKDSTSAKHLRAMARAVNYVWNYCNEIQKKAAHDNRRWVNWVMLNNLTSGCSKELRLHSQTIQAIGERFHASLKEAKFPTGKKKRFLRFRGRRSQGWIPFKASGIKLRDDVVVYQGRTFRFWKSRDIPSTIKCGNFSCDARGRWYVNLVCKYEETIVSKEDTVGIDLGLKSVATLSNGKKYDAQKFFRKYERKLVHHQRCNNGRQVRTIHAKIANSRKDFNHKVSHELTRDFNKIFVGDVGCLSLLKTKLAKSVSDASWGQLRTFIEYKAIARGGTYYVVDENNTTRTCSACGCLSGPSGLAGLRVREWQCKECGTVHDRDTNSAINIEQRGLLTLCSPLRTLSAKEEIL

SEQ ID NO: 2434 - protein, 386 aa, Unknown
  Description of Unknown: uncultivated organism sequence
  Category: MG81 effectors
  Description: MG81-717 effector
MAGDIPPNNDDQLNINTLYVHTTMNIQIKILSVRIKDKHAAVLRQMAFEVNQIFNLANEITSAAYGNAGFFGAQKPQWLSAFDVQKPLLKERKERGYTIPSHTVQEIAAIHGKARKQFKRSRLRWRVSGGSRRSLGWVPFKIGSAVWKNGAVRFAGRIFNVWDSYGLGGFKFRAGSFSEDSRGRWYFNVCVEVETVPSTATSAVGIDLGLKDYATPSEGDPLIAGRFYRDLEPALGKAQRANKKARVRAIHAKIKNRRKDALHKYSTALVNSHAAIFVGDASSKKLVKTKMAKSILDAGWFMLKTQLEYKAIARSVMFEVVNESYSTQACSCCGAISANSPKGRAGLRIREWTCCECGTTHDRDVNAAKNILAAGHRRLAVGIPFL

SEQ ID NO: 2435 - protein, 570 aa, Unknown
  Description of Unknown: uncultivated organism sequence
  Category: MG81 effectors
  Description: MG81-718 effector
MHGTSQSFSGVFCVQIRGVLRPVFGGWKALFRDLECNPLQICEFWPIINIITKKRGIPVKKCTTDTCCLTLPLKLEKWQEDCLAKRFEIARQIYNTLVRAEFKKLNELERTPEYNKILEQIHSLDWKGSGNRQRLNDLYRERNQILKNAKFTEYGFKSDMKFYYKHFSDNIGSCVAVHGIAPQVWAAFEKYLFKPEGKKVHFKRFGDVHSLRGYSKAGESGGAEITFCGTHIRWKNLELPIKLSPDNAYETEMLSRRVKYVRILRKPGKSKDRWYVQLSLEGKPAIKYDRNAGEIKHPVAHGAVGLDIGPQTLAYSAETTADLVELADQVQNIEQEKRRLQRKMDRSRRSTNPGNYNTDGTIRRGVKLTRNKSKAYCKLQRQLAYLQHTQAETRKRQHTELANYLLSLGDCFYVEEMKWSSLAHRAKETAVSEKTGRFKQKKRFGKSIANKAPSTLIGILQQKCESLGLPGIIYVPLSAKASQYNHLTGEYTPKPLSQRWNTMPDAQRVQRDLYSAFLLQHFDSQAGIYNLQSLQRDYPQFLQYHDQSIRRLSEMPKTLSSMGIRKSIRA

SEQ ID NO: 2436 - protein, 336 aa, Unknown
  Description of Unknown: uncultivated organism sequence
  Category: MG81 effectors
  Description: MG81-719 effector
MQTYHFRIKDSTHINWLCKKAGIVNHIWNEVQSFRLSFYNLFGDLFSEYDIHKICKFQNINSATVQLVIKNYIQKSKQFKKLKLKWRTSRKSLGWIPFDKRNFLFDYETGTATYMKRSFKLWYSQKVDGNVLCGSFNQDASGHWFLNITTDAVIEKERVCDREIGIDLGCKEQITCSDGVVYERENLTRKFADKLATAQRARKKRQVTKIHRKIKNIRNDWNNKVTTDICRTSKLVVVGNIIAKGLCKTRMAKSIFDVATFQIKSMLSYKAIRHCMDVLIVSEKFSTVTCSVCHEKTGPSGLSGLGVRAWDCPICGSHHHRDVNAAINILSSVRGI

SEQ ID NO: 2437 - protein, 538 aa, Unknown
  Description of Unknown: uncultivated organism sequence
  Category: MG81 effectors
  Description: MG81-720 effector
MDNEEKEKDGATCCLTLPLKLEKWQSDHLEKRFEIARQLYNTLVHAELKKKCQVERMPEYQEIMKMIDAASNQKEKWALEKKRKAFLEENGFSRNAFKADMEKYYKHFNDNIGANVALHGITAQVWIAFDKVFVDNYKQKGKVHFKKPGELCSVQGYSQKKSGGKEIMFREDRIIWNQQGNRDRKKVKREFLLKLSPDNPYEAEMLKRHVKFVRILRKDGKTKPHWYAQLVLEGKPAVKRDPISSAPKHPVGHGVVGIDIGTRTLAYSTDKEVNLLELADRVQNIEQEKRRLQRKMDRSRRAMNPENYNSDGTFKRGVKLTRNKSKRYRRIQHQLAMIQHHQADIRKQQHNELANYLLTLGDCFFVENMSYCDLVHRANKTEISEKTGRYKRKKRFGKSIANKAPAMLITMLKQKCQSRGLEGVKEVDTHVRASQYNHQTDTCIEKALENRWNVMPDGERIQRDLYSAFLLQHCKQGLPEYNRKELKKEFGEELYRVFDREALQRDYPQFVAYHHMTIQRLSELPHTIPSMGIRRIIS

SEQ ID NO: 2438 - protein, 538 aa, Unknown
  Description of Unknown: uncultivated organism sequence
  Category: MG81 effectors
  Description: MG81-721 effector
MDNEEKEKDGATCCLTLPLKLEKWQSDHLEKRFEIARQLYNTLVHAELKKKCQVERMPEYQEIMKMIDTASNQKEKWALEKKRKAFLEENGFSGNAFKADMEKYYKHFNDNIGANVALHGITAQVWIAFDKVFVDNYKQKGKVHFKKPGELCSVQGYSQKKSGGKEIMFREDRIIWNQQGNRDRKKVKREFLLKLSPDNPYEAEMLKRHVKFVRILRKDGKTKPHWYAQLVLEGKPAVKRDPASGAPKHPIGHGVVGIDIGTRTLAYSTDKEVNLLELADRVQNIEQEKRRLQRKMDRSRRATNPENYNPDGTFKRGVKLTRNKSKRYKRIQHQYAMIQHHQADIRKQQHNELANYLLTLGDCFFVENMSYCDLVHRANKTEISEKTGRYKRKKRFGKSIANKAPAMLITMLKQKCQSRGLEGVKEVDTHVRASQYNHQTDTCIEKALENRWNVMPDGERIQRDLYSAFLLQHCKQGLPEYNRKELKKEFGEELYRVFDREALQRDYPQFVAYHHMTIQRLSELPHTIPSMGIRRIIS

SEQ ID NO: 2439 - protein, 368 aa, Unknown
  Description of Unknown: uncultivated organism sequence
  Category: MG81 effectors
  Description: MG81-722 effector
MKTLKLRIRDKHTAKLNRLSGAVNFVWNYVNALSYEHLKRTGKFFSAYDLNEYTKGSGELVGLHSQTIQAINETHAKARKQFKKAKLSWRTNNPKSKRKSLGWLPFKKSAIKHIATYQTGKKGLKSTLQLSLAKGQKLIIDLWDSYNLSLYQINTLEIVQDSRNRWYACITVKEYPKTTCGTGSVGIDLGLKDSATASNGDKLQIKQTLKYAKQLAIAQRSNNKKRIKAIHAKIKHTRQDLIHKFTTQLVKDNALIVVGDVKTTQFNSKKGKLAKSVYDAGWFELKRQLTYKCENAGCRFEIVSERYTTQTCSCCGQIDRNSPKGRAGLRIREWTCAMCGTWHDRDINASRNILAVGLGRLGAGIPER

SEQ ID NO: 2440 - protein, 512 aa, Unknown
  Description of Unknown: uncultivated organism sequence
  Category: MG81 effectors
  Description: MG81-723 effector
MPTKQKEGGNRCVLTLPLLTEPWQEHIIEKRFKIIEHLKNQLISIELRKLKNLQRTKAYKNLIKQIESVPKSERTALYKERNKMLKDAGFSQYTFMDDMAGKKSLMQKHFESHINVQIAHKAAIDVWSSFEKFLFGTGQIVHYQKRGTLSSVASKSPKTGMFYYSDENIFKWSGGGTKPKGGIILCLRVASVKTNYEKEMVANNEIKYYRVVRKWMKTKYKYYLQITFAGKPADKHREISTGRVGIDIGTQTIAIASDKSVKLLELADKVNKNHIKKCELQRKLDRSRRYTNPDNFNPDGTVKRGTKGHKLKWNKSKHYIEIAGKIRELERKNADIRKYQHTCLANDILAMGNQIYIEPMDYKGLQKRAKETQVDEKGRYKKKKRFGKSLANKAPAMFVTILKTKVEQHGGEVYEVDIMSYRASQCDHTTGEYTKHGLNDRWRILGNGDKVQRDLYSAFLIKNSNKTHDEIDLDKCSKTYDSFKKLHDTEIENIRNEVMLRERKNISSYGIA

SEQ ID NO: 2441 - protein, 360 aa, Unknown
  Description of Unknown: uncultivated organism sequence
  Category: MG81 effectors
  Description: MG81-724 effector
MEVTKMLVRELKLKPTKRQEATLNEWLWCLTGVYNWASRKIELDAQDKIYHRKLAFQNSLSGVSKKLDIPSHTIQATILQAYNAWERCFKKVSKQPKLKSVRNKLRSICFPDPLNGKRISENRISLPGLKSVRFYKQDLPEGSIKQARIVKRALGWYCQICIDTVHIFPVENTDEAVGIDTGFKDLAILSTGKKFSNGREFVKGQKRLAQAQRGGRKKLAARLYERISSRRKDYNHKVSRQIVQNFKEIYITNDNLRGQAKIFGKSVSDAGISQLRQFLIYKGAQHSRKVVLVDSKYTTMTCSICGSLTGPTGLSGLVVRTWKCGACGAQHDRDVNAAKVILKSGLGCSLGVLESSGGAR

SEQ ID NO: 2442 - protein, 338 aa, Unknown
  Description of Unknown: uncultivated organism sequence
  Category: MG81 effectors
  Description: MG81-725 effector
MNDLSFQVWRRKRVFLSAYDIHEYTKGAGEELGLHSQTLQAVGETHAKSRKQANRSKLHWRTNRKDAKRKSLGWIPFKASAVKVLRTYNTGKTALKSQVQLSCGKEKLILTMYDQYDLRRYTEIKTASVVEDICGNWYLCLTVKVNPVTANIATGEVGIDLGCKTAATCSNGDKLETKFTHQYAEKLATAQRAHKKKQARKIHRKIRNSRANATHQFTNLLVKNNRLIVIGNMKASTFTSGKLAKSVYDANWSEIERQLEYKCEHAGCLLVKVNENFSTQTCANCLQITNSSPKGVAGLGIREWICGCCGQLNDRDVNAAKNILRFGRETLAEGSPVI

SEQ ID NO: 2443 - protein, 387 aa, Unknown
  Description of Unknown: uncultivated organism sequence
  Category: MG81 effectors
  Description: MG81-726 effector
MIIPMQTKTLKLRIKDKHAAWLRGLAREVNQVFNFCNEVSAKASSPYNSKPRWLSGYDLQKLVAGSTKGEDALSIPSQTLQQVCEEYASRRKQFKKHKLRWRVSNPKSSKYSLGWLPFKKGTVVYKNGQIRYAGKLLSLWDSYSLGQFELRAGSITEDSRGRWYLNVVVQVESTNGNGTSILGIDLGLKEAASCSDGQVLKSRWFREMEQALATAQRSGKKMRTKAIHAKIANRRKDAMHKLSTKLVKENAAIFVGNVASAKLVKTNMAKSTLDAGWSMFKTMLEYKAQAAGVVFEEVNEAWSTQKCSACGSIEGPKGRKELYVRSWTCSCGAHHDRDVNAATNICAKGLAQLAISKAAEVEAGEPVLNKAQAEVGHGLPAEGILTL

SEQ ID NO: 2444 - protein, 377 aa, Unknown
  Description of Unknown: uncultivated organism sequence
  Category: MG81 effectors
  Description: MG81-727 effector
MNGASSTKTKVLRLRLKDKHAKLLRDLAREVNFVWNYCNELQITMFNRERRFLSGYDFPKFTRGATKEGLRLHSQTVQAIAEEYATPRRQFSKVRLSRRKSTGNRRSLGWIPFKKSAIQPAHGQVKFAGQWLSLWDSYGLEAYQIRAGNICEDARGRWYLNACVAVPSAEPRSSARRDVGIDLGLEDLVATSDGGKLSAPQFYRGLEPKLVIAQRAVKKHRVRAIHAKIANRRNDSLHQFSTRLVRGYDTIFVGNVNASALVKTTPYAKSVLDAGWSAFRTMLRYKCDFAGATFAEIDEAFSTQTCSACDSRSGPKGIAGLGIRAWKCSKCGAVHDRNVNAAKNILAAGRRRLAEGIPAPFRAREDVKNAVVLGKPL

SEQ ID NO: 2445 - protein, 383 aa, Unknown
  Description of Unknown: uncultivated organism sequence
  Category: MG81 effectors
  Description: MG81-728 effector
MIQCQLKLRLTKAQEATLEVWLFRLTGVWNWAVRKIELDARDKIYHSKYDLDAMLVGHCTRLEIPKQVLKCTIFTVHQAWMRCFKKLSKKPRLKGNRNRLNSIPFSAQILRPKAARIHVSGLGKVKFHKQEMPEGKIKCARIVRRASGWYYCLFIDAEPNAIPRKASGQIGIDAGFKNLLTASTGEIIEHPRELEAVAQRLGQAQRARNRKLTARIQERIRNRRKDRNHKISRQLVSENVLIAFSKDSHNRIAKRFGKSVASSGHGQLRSMLTYKSRAGGAVYVEPESRNSTKRCSNCGSLSGPTGLSGLAVRRWTCGCGAEHDRDCNAAINTLIVGLGMSHERAHKTPVRNPVPPSEVQVEELKHRKFIPEQAGFRRRKIWK

SEQ ID NO: 2446 - protein, 364 aa, Unknown
  Description of Unknown: uncultivated organism sequence
  Category: MG81 effectors
  Description: MG81-729 effector
MKTYQFRLKSTNQAKLSKMAGAVNFVWNYVNSVSKEYTEKKGVWLSAFDLQHLTKACSGELGLNAKTVQMICHEHVNRRKGSKRLQLAWRSKNRSLGWIPFSGQDLPLKGDVVKHIGIEFRFWKTREIEGKIKVGSFCQDARGRWYVNFTCESVNKEPVDSNISVGIDLGLKTIATLSDGRTLNRENITNKYADRLAMAQRAGKKRLTKTIHTKIKNVRKDWNHKQTTNIVNSYDTIVVGNVSSSKLKKTRMAKSVSDAGWADFKRMLAYKAIALGVQYKEVNESFSTVTCSICEGKTGPTGLSNLGVREWTCSTCGTIHLRDVNAAKNILRIGHNALLMESSNLGKMSKTMDKKQNDIDTGNG

SEQ ID NO: 2447 - protein, 390 aa, Unknown
  Description of Unknown: uncultivated organism sequence
  Category: MG81 effectors
  Description: MG81-730 effector
MNDPLMPLSFTRTLKFKVKAESYAWLNAAAVEVNQVFNFANQASYDARRRTDLKSKWLSGFDLCNLTSGATEYFERIGADTIQQVCTHYAQKRTAAKRLKLRWRVSRGARRSLGWMPFKAASLRRRGNALRFCGKTFRVFERERLADVKWRDGCFAQDAVGDWWLCLPVIVTAEQTIAPLESVGIDLGLKTIATTSDGEKLEAGRWTAGNAEKLAAAQRRGHKKQAKRIHRHTANQRKDALHKFSRKIVDSYQTIVVGDVSSTKLVKTKMAKSVLDSGWGMLKAQLQYKGQQAGRSVSVVSERNTTRACSSCEAFTGPAGLDMLVVRRWDCPACGAEHDRDINAARNILIAGSRCLTSVSGNESSDSPVPSSRLRKRRRETGTETARTAA

SEQ ID NO: 2448 - protein, 351 aa, Unknown
  Description of Unknown: uncultivated organism sequence
  Category: MG81 effectors
  Description: MG81-731 effector
MILVYRYRVKSPTKILDEQSRAVNYVWNFCNESQKSCLRLGKRWLSGFDLDYLTTGTSKELGLHSGTINSVCDQYAKSRKQKKRPFLRWRGKKSLGWIPFKGRNLKWKGDAFVFGGNTFRVFFSRPIPDGAIIRDGSNFSQDARGNWFLNVVLRLPDNPRRGIRTSVGIDLGLHDLAALSTGEKIENPRHLAKLADKLARAQRAGKKKQATNIHAHVKNARRDFQHKLSTCLVKQFDAIYVGNVSSSKLSKTRLAKSVLDAGWSSFRSMLAYKCDYAGGRFSEVNESFSTQVCSSCGCLPEGRPKGIADLGKRQWDCVECGSHLDRDLNSALNILHAGSGHRSPAEGIPAL

SEQ ID NO: 2449 - protein, 389 aa, Unknown
  Description of Unknown: uncultivated organism sequence
  Category: MG81 effectors
  Description: MG81-732 effector
MAEPILTQTIGVTLKLRPTCAQAATMQRWLWHLTAVYNWAVKTIERDAERRVYRSTFDMYALVNGHSRRLEIPRSAIRGTIGTAHNAWQRAFHRVSRRPKLKGRRRPLNSIAFSQANKRPIRGRRIYLAGLGEVRFHEQAIPDGKIVCLRVVKRASGWYVCLFMNAAPRTIPRVAAGQIGIDPGFSSLLTLSSGELIEHPKELKVAALRLAQAQRGKRRRLTARIQERIANRRKNRNHHLSRQLVAENTFIAFSKDRIKAIEKRFGKSTASAAHAQLRSQLRYKSLTGGTKFIEVPSRNSTRTCSACGALTGPTGWSGLTVRQWTCGCGAEHERDVNAARNTLFAALGTSVESRREAASGIASKATSRGSCLVAWGPLPCTTADLSTPI

SEQ ID NO: 2450 - protein, 913 aa, Unknown
  Description of Unknown: uncultivated organism sequence
  Category: MG81 effectors
  Description: MG81-733 effector
MSYLAAKYIDLGKGVYHFTMKDKLDMLNKNEAVTDLRFGIVSEKYEKGITSFDYERIKAEEELDRNIAAYVTFAADIFAKSVIKSDYRTKKDNNSDVLQYSDKEFRNSEVIRDNAEKNILQYWGGYSRWGTENSKLPENNKVSDFGKLDVSDLCIDIKKHLAGIRNSSVHYTTKIKNESAADGSNVKILFEKDLADINIIYADKYYSNNVWMFYSLEDINKLIAFLYKEKRVIRQVQIPSFSRILKRKAMQDVINEIFKDDFDENIVNPELKEKYRNSLYFMLKEIYYNAFIIQPELKEKFKDKIKTMKSELYNKLKTIDKKEYKALYCMLSNEESALKNFADRIYSVDGDNVSFADICKILMTDYNMQNQEKKNIESMEQKKKNKGKDENYKHFPLLLHKVLKELFIEYLKQTHELEFLRNNICIKSDVTMESFESQIKGVEIYKDLKEKIDKNNSLLDWYVIAHFLMPKQLNHLIGNIKNYIQFATNIDKRAESVKNLTGSGMVKRIQYYDDIVRTLEFSAQYIGKISNNINDYFNSEDEYVSFLSKYVGFINDKSEDVLTELKDFCREKINNGSQIIGIYYGGDNVIINRNVIYAQMYSNAEVFSNIYKKVTKNDIINYYEKQNDLKDVFKSGVCQNEDEQRSLCEFQQLKNRIELTELSTYADMVNDFMAQFVEWAYLRERDLMYFQLGIHYIRLFYSDNVLDEKYHKLSDNVIDIEEGALLYQIVAMYDYELRIFETDNSGNAKRIGQGGPGKSIPVFLKKYCNVTDVYECGLELFEDINQHEHIIRFRNDIAHMRYMSNQAMNIMSIVSNIYKSFFVYDTKLKKSISLVFKNILMRYGVIADLVFSYNNKNQSIKDDMDINIINIKNLKSDKYVYKIVNEDIVKQVEIEIRNQVFLEQLHNLLYFSR

SEQ ID NO: 2451 - protein, 364 aa, Unknown
  Description of Unknown: uncultivated organism sequence
  Category: MG81 effectors
  Description: MG81-734 effector
MNIQIKTLKVRIRDKHADVLNRMSFEVNQVWNAANETSAEFAWVPVPEVGYMNMQTSGFDLMKELKGIRKERSMIISARTVQEVIAVHAKTRKQFKKDKLRWRSSGGARRALGWVPFKSGSACWINGQVRFCGIYFKCWDSYGLSQYDFRSGCFSEDSRGRWYFNIVVHVEEEVRLSEGGQIGIDLGLKTTATCSNGVVLERKQFYRNLEEKLGKAQRANKKKLVKTIHAKIKNQRLDANHKFSRKIVNENSLIVVGNVSSSGLAKTKMAKSVLDAGWFMLKTMIDYKSKAMQSAFIEVNEAYTTQACSCCGCISSSSPKGRRDLDVREWTCAECGTEHDRDINAAKNILSLGHQRLAVGILSL

SEQ ID NO: 2452 - protein, 511 aa, Unknown
  Description of Unknown: uncultivated organism sequence
  Category: MG81 effectors
  Description: MG81-735 effector
MAKCSTDTCCLTLPLRLEKWQEDRLAKRFEIARQIYNTMVRAELKKLRAMEQSEPYKANQEKIQALDWKTQTDKQALKALYKERDKLLRDGGFSEYGFKSDIKNYYKHFNNNIGSNVAFHGIAPQVWAAFEKMLFKKEGKKVHFKKKGDIHSLRGYSAAGKSGGVEIIFRETYIEWKGLKLPLKLSPDNIYETQMLSYRVKYVRLLRKPGKRKDRWYAQLSLEGKPVIKYNPKTGEVRHPIGKGAVGLDIGPQTLAYSAATGADLVELANQVQNVEQEKRRLQRKLDRSRRATNPGNYADDGTIRRGIALTHNKSKRYLRTQQELKYLQHQQAEIRKRQHTELANHLLSLGDCFYVEKMVWTSLTHRAKETEISEKTGKIKRKKRFGKSVANKAPATLIGILQRKSAALGIAGVIEVPTSVKASQYNHQSGTYTPKPLSQRWNNMPDGERIQRDLYSAFLLQHYDPQTNTFDANSLHQDYPQFVQYHHDAVLRLYAMPKTPSSMGIKRSLR

SEQ ID NO: 2453 - protein, 511 aa, Unknown
  Description of Unknown: uncultivated organism sequence
  Category: MG81 effectors
  Description: MG81-736 effector
MAKCSTDTCCLTLPLRLEKWQEDRLAKRFEIARQIYNTMVRAELKKLRAMEQSEPYKANQEKIQALGWKTQADKQALKALYKERDKLLQDGGFSERGFKSDIKNYYKHFNNNIGSNVAVHGIAPQVWAAFEKMLFKKEGKKVHFKKKGDIRSLRGYSITRKSGGVEIIFRETYIEWKGLKLPLKLSPDNSYETQMLSYRVKYVRLLRKPGKRKDRWYAQLSLEGKPVIKYNPKTGEVRHPIGKGAVGLDIGPQTLAYSAATGADLVELANQVQNVEQEKRRLQRKLDRSRRATNPGNYADDGTIRRGIALTHNKSKRYLRTQQELKYLQHQQAEIRKRQHTELANHLLSLGDCFYVEKMVWTSLTHRAKETEISEKTGKIKRKKRFGKSVANKAPATLIGILQRKSAALGIPGVIEVPTSVKASQYNHQSGTYTPKPLSQRWNNMPDGERIQRDLYSAFLLQHYDPQTNTFDANSLHQDYPQFVQYHHDAVLRLYAMPKTPSSMGIKRSLR

SEQ ID NO: 2454 - protein, 351 aa, Unknown
  Description of Unknown: uncultivated organism sequence
  Category: MG81 effectors
  Description: MG81-737 effector
MLHTKTLKVRVRDKHAPLLRQMARSVNFVWNYLNELSQRSIRERGGFLSAYDLHPYTKGAAKELGLHSQTLQCIAAEYVTRRKQFKKVRLNWRKSAGVRRSLGWIPINTGAASWKNGQVYHNGHYFKVWDSYGLAGHKFRSGSFSEDSRGRWYFNVVVDVEESVSMGQGSVGIDLGLKDIATCSDGRQLENNQFYRGMQQKLAIAQRSRNKARTRAIHAKITNRRKDALHKFSRKLVDSYGTIIVGNVSPSKLVKTKMAKSVYDAGWSMLKTMLEYKCDHAGIVFKEVNEAYTTRACSACGSLTGPRGVNGLRIREWTCCECGVAHDRDINAARNILALGHERPSVGIPVL

SEQ ID NO: 2455 - protein, 367 aa, Unknown
  Description of Unknown: uncultivated organism sequence
  Category: MG81 effectors
  Description: MG81-738 effector
MYQVLRLRIYRKHNAKLNKLASAVNFVWNYVNDLCLQMWQRKRVFPSAYDVAEYTKGAGEYLGLHSQTIQFIGEKHHQSRKQHKKVKLAWRTNRPDAKRKSLGWIPFKASAVKVLRTYNTGKTALKSQVQLSCGKEKLILTVYDQYDLRRYSGFRTAEIVQDSCGDWYLCLLVKVEPKICTAIGEVGIDYGCKTAATCSNGDKLETKFTRQYAEKLATAQRARKKKQARRIHRKIKNSRADATHKFTSKLVRENRLIIAGNVKSSSFTSGKLAKSVYDANWFAINRQLEYKSRRAGCQFIVVDENFSTQTCANCLQITNSSPKGVAGLGIREWICDCCGQLNDRDVNAARNILRFGRETLAEGSPVF

SEQ ID NO: 2456 - protein, 347 aa, Unknown
  Description of Unknown: uncultivated organism sequence
  Category: MG81 effectors
  Description: MG81-739 effector
MLQVQLKLRPCKAQEQIYDQWLYNLASVYNFAVRKIELNAKDKIYFSKNDFQNLLANHGEKLGIPSHTIQGVLCTVHDAWKRCFKKTAGKPKLKGMRNKMSSIPFPDPIKAPKGNRITLPGLGSVRFHKQEISEGKIKCGRLIKRASGWYLCLFIDAEPNPIKRLAFGAIGIDPGFSNLLTTSDGEVIEHPRELEAAAERLGQAQRGHNKQLAARIQERIANRKKDRNHKLTTKLVSENVLIVWSKDAIKGIAKRFGKSVNSSSHAQIRQMLSYKMPKSGGTFIEVASKYSTKTCNECGNPTGPTGLAELSVRRCSACGAEHDRDVNAARNTLFAGAGCAHEELAYV

SEQ ID NO: 2457 - protein, 365 aa, Unknown
  Description of Unknown: uncultivated organism sequence
  Category: MG81 effectors
  Description: MG81-740 effector
MDNQLPTKTLKLRIRDKHSNFLLAQSKEVNLVWNYVNDLSMQILKREQRFCSAYDLSKYTAGATKAGLSLHSQTVQAIGDEFVTRRKQFKKVKLKWRKSGGSKRSLGWIPFKSSAIRYKNGQVFYCGKAIGLWDSYGLSKYQLGTGSFSEDSRGRWYLNVTVKVNQKTESGGQLTGVDLGCKEAATASDGSQVHGRRYRALEQKLALAQRARNKYRIKNIHAKIKNQRKDDLHKFSSALVKRSGAIFVGNVSPTGMAKTKNAKSSLDAGWGILKSMLEYKCRWADVVFGEVNEAYTTQTCSCCGSISSSSPKGRADLGIRSWTCVVCGTHHDRDINAGINIAKRGESQFLVGAGHCPPVVGIPVL

SEQ ID NO: 2458 - protein, 347 aa, Unknown
  Description of Unknown: uncultivated organism sequence
  Category: MG81 effectors
  Description: MG81-741 effector
MLLAYRYRVKSLEGLLKAQSRAVNFVWNYCNETQKSALKWNKRWPSGFDLNKLTAGTSKELRLHAGTINSVCEQYANSRSQKKRPYLRWRGKKSLGWVPLKGRDLRREGDAFRFAGNTFRVFYSRPLPDGKIKDGTSFSCDARGRWFLNIVIEVAAATPRQVAAAIGIDLGLKDFAALSTGETIGNPRHLRKLAVDLAIAQRAGKKGRARSIHAKISNARADFHHKLSFRIVREFDYIAVGNINAAGLAKTNMAKSVLDAGWSSFRNQLRYKAIKHGAWFAEVSEYGSTRVCSSCACETGPKGVKDLGIRIWICSECGTSHDRDTNAALNILFRSGHRTPVEGIPVL

SEQ ID NO: 2459 - protein, 390 aa, Unknown
  Description of Unknown: uncultivated organism sequence
  Category: MG81 effectors
  Description: MG81-742 effector
MKSNNTLMPPLLMRTLRLKVRSEAYPWLNAAAIEVNAVFNYCNETSYKAATRTDLKRKWLSGFDLCSLTAGASQYFEKIGSDTIQSVCVQYAQNRKAAKKLKLKWRVSRGAQRSLGWIPFKAAALKRKGRGVRFAGKCIRVFERERLEGAKWQGGEFAQDSVGDWWLCLPVKVQAEETIAPQEAVGIDLGIKCIAATSDGDRLEAGRWTRRYAEKLASAQRRGHKRQAKRIHRKVARCRADALHKFSRTMVDRYQHIVVGDVSSLKLVKTRMAKSVLDSGWGTLRRFLAYKCEHAARGFEVTDERYTTVTCSHCGALSGPRGVNGLIVRFWVCRNCGELHDRDVNSARNTLIGSRCRTSVCGNKLSYSLISPSNAYRVREAEIELARTAA

SEQ ID NO: 2460 - protein, 351 aa, Unknown
  Description of Unknown: uncultivated organism sequence
  Category: MG81 effectors
  Description: MG81-743 effector
MKTFKFRLKRRNTAKLEKMAGAVNFVWNYANQTSVEYLDKFGKWLSGYDLNYLTVGCSKDLGINANSVQFVCEELAKRRKQSRRRKLSWRSQKRSLGWVPFKQDGILIKDDVITYYGNQFKFWKSRQIEGKIRGGSFTQDSKGNWYINIVCEVPRSIRIADNREVGIDLGLKTLATLSDGNKIDRFNITDKYADRLAMAKRANKKKRATAIHAKIKNTRKDFNHKETTKLVNNYGKIFVGDVSPSKLMKTNMSKIVTDVSWCDFKSMLAYKAIALGVEYKEVKENFSTVTCSTCFERTGPSGLSALGVREWTCKCGATHDRDVNAAKNILRFGHETPIKGSPYYKRNVSKR

SEQ ID NO: 2461 - protein, 511 aa, Unknown
  Description of Unknown: uncultivated organism sequence
  Category: MG81 effectors
  Description: MG81-744 effector
MREDSQNTCCLTLPLKIEKWQADRLIKRFEIARQIYNTLVHAELKKLQKMEASAEYRQIQDRIRELNPSDVRAKKEWKILKDKQEKLWKAWKITEYGFKSDIKAYYKYFNENIGSAVATHDIAPRVWAAFEKKLNDRTGKVKIQYKKAGDIRSLKGFSVSGKSGGTEIIFHKTYIAWKGLTLPLKLSPDNAYEKEMLMRRIKYVRILRKPGKHKDRWYAQLSLEGNPVVKLDPVSGLPRHPIGKGAVGIDIGPQTLAYSAEGGADLVELADQVQCIEQEKSRLQRKMDRSRRASNPDNYAQDGTIKRGVKLTHNKSRRYCKLQKELAYMLYRQAETRKRQHRELINRLLTMGDCFYIEDMHWNSLAHRAKKTEISEKTGRYKRKKRFGKSIANKAPAMLVDMLEQKCKSLELDVVMVNTSLKASQYNHQTGKYEKKTLSQRWNHMPDGEQIQRDLYSAFLLQHVVPEKNAFDNEALCRDYPKFVQYHHEVIERLRSLPKTISSMGIRQSVS

SEQ ID NO: 2462 - protein, 353 aa, Unknown
  Description of Unknown: uncultivated organism sequence
  Category: MG81 effectors
  Description: MG81-745 effector
MKQTKTLRVRVRDKHAPLLRQMARSVNFVWNYLNELSWRAIRERGVFLSAFDLHPYTKGAGKELGLHSQTLQCIAAEYVTRRKQFKKSRLRWRKSGGARRSLGWIPLNTGAASWKHGQVFHNGHHFKVWDSYGLGDFRFRSASFSEDARGRWYFNIVVDVGTQLGTGQGVIGVDLGLKDVATCSDGRKLENGRFYRDLEAKLAVAQRAGNKERARAIHAKIANRRKDALHKFSRQLVNQHAEIYVGDVSSQKLTQTRMAKSVLDAGWGQLKAMLAYKCAHAGIVFKVVDERYTTQTCSCCGAKPDSRPRGIAGLGIREWTCSECGVTHDRDINAARNILAAGRGRPVVGIPVL

SEQ ID NO: 2463 - protein, 397 aa, Unknown
  Description of Unknown: uncultivated organism sequence
  Category: MG81 effectors
  Description: MG81-746 effector
MAAPVNAPHTTRVLRLRLKDRHADALRALAGEVNFVWNYCNELSTKGFQRERRFIGAYELHKYLSGAGKDGLQLHSQSVQAVADEFARRRKQFKKVKLRWRVSRGARRSLGWVPFKASAIQYKNGQVHLAGTPLSLWDSYGLSRYELGAGNISEDARGRWYLNVTVKSPGWPKSRNLEQVQGDAVGIDLGLKDFLATSEGELVEAQRFYRDLEPALAGAQRAHRARRVKALHAKIANRRKDFLHKLSTGLVRQHQAIFVGDVNARALARTTMAKSVLDAGWSAFRTMLQYKCDDAGVWFSEIDEKFSTQECGACGARTGPRGREGLSVRSWECSRCGTQHQRDVNSATIIRNRGLVWLEKAFSTPGEARADEAGVNEGALRAPAAGHGRPDVGIPAL

SEQ ID NO: 2464 - protein, 512 aa, Unknown
  Description of Unknown: uncultivated organism sequence
  Category: MG81 effectors
  Description: MG81-747 effector
MPTKQKEDSNRCVLTLPLLTEPWQEHIIEKRFKIIEHLKNQLISIELRKLKKLQRTKAYKNLIKQIESVPKSERTVLYKERNKMLKDAGFSQYTFMDDMAGKKSLMQKHFESHINVQIAHKAAIDVWSSFEKFLFGTGQIVHYQKRGTLSSVASKSPKTGMFYYPDENIFKWSGGGTKPKGGIILCLRVASVKTNYEKEMVANNEIKYYRVVRKWMKTKYKYYLQITFAGKPADKHREISTGRVGIDIGTQTIAIASDKSVKLLELADKVNKNHIKKCELQRKLDRSRRYTNPDNFNPDGTVKRGTKGHKLKWNKSKHYLEIAGKIRELERKNADIRKYQHTCLANDILAMGNQIYIEPMNYKGLQKRAKETQVDEKGRYKKKKRFGKSLANKAPAMFVTILKTKAEQHGGEVYEVDIMSYRASQCDHTTGEYTKHGLNDRWRILGNGDKVQRDLYSAFLIKNSNKTHDEIDLDKCSKTYDSFKKLHDKEIENIRNEVILRKRRNISSYGIA

SEQ ID NO: 2465 - protein, 349 aa, Unknown
  Description of Unknown: uncultivated organism sequence
  Category: MG81 effectors
  Description: MG81-748 effector
MLQVQLKLRPCKAQEQIYDQWLYNLASVYNFAVRKIELNAKDKIYFSKNDFQNLLANHGEKLGIPSHTIQGVLCTVHDAWKRCFKKTAGKPKLKGMRNKMSSIPFPDPIKAPKGNRITLPGLGSVRFHKQEISEGKIKCGRLIKRASGWYLCLFIDAEPNPIKRLAFGAIGIDPGFSNLLTTSDGEVIEHPRELEAAAERLGQAQRGHNKQLAARIQERIANRKKDRNHKLTTKLVSENVLIVWSKDAIKGIAKRFGKSVNSSSHAQIRQMLSYKMPKSGGTFIEVASKYSTKTCNECGNPTGPTGLAGLSVRQWECNVCGAQHDRDINAAINTLAAAAGCAVEGYAYV

SEQ ID NO: 2466 - protein, 413 aa, Unknown
  Description of Unknown: uncultivated organism sequence
  Category: MG81 effectors
  Description: MG81-749 effector
MESSHARTFMLGWRLLRRPRKAMQPQDPTRPRIHSVTRTLRLKVKTESYAWLNTAAYEVNQVWNWSAEVSEKAARPCTGERKWLTGFDLNNLSAGASEYFDKIGADTIQRVNGEYAEQRRIAKRIRLRWRTSRGPRRSLGWVPFKAASLKRKGRSLRFCGKTFRVFEPERLEGVKWRQGEFAQDAVGDWWLCLRIKIQVEESVAPLEKVGIDLGLTEVAVTSDDARCEKSCFYRGIEQKIAQAQRRGHPRQAKFLHRRAANRRKDALHKFSRRIVNEYEKIVVGDVSSTQLVKTRMAKSVLDAGWGMLRTYLQYKSQQAGRTFQIVNERNSSRTCSNCDALTGPQGVNGLRVRRWTCAACGVSHDREVNAARNHLRRAELPASVRKRVIVLAGSAEPSIPLAQGRTEPVRTVA

SEQ ID NO: 2467 - protein, 378 aa, Unknown
  Description of Unknown: uncultivated organism sequence
  Category: MG81 effectors
  Description: MG81-750 effector
MHGASCTKTKVLRLRLKDKHAMFLRHLAGEVNFVWNYCNELQITMFNRERRFLSGYDFAKFTRGATKEGLHLHSQTVQAIAEEYATRRRQCRRVRLSWRKSTGRRRSLGWIPFKKTAIQAAHGQVKFAGRWLSLWDSYGLDAYPIRAGTICEDARSRWYLNACVAVPVAEPRSSARRDVGIDLGLKDLVATSDGEKVSAPQFYRGLEPKLAIAQSAGKKDRVRAIHAKIANRRKDSLHQFSTRLVRGYDTIFVGNVNTSALAKTSFAKSVHDAGWSAFRTMLRYKCDFAGATFAEVNEAFSTRTCSACDSRSGPKGIAGLGIRAWKCSKCGAVHDRNVNAAKNILAAGRRRLAEGIPALLGRGRTSNCGETVRRTILC

SEQ ID NO: 2468 - protein, 351 aa, Unknown
  Description of Unknown: uncultivated organism sequence
  Category: MG81 effectors
  Description: MG81-751 effector
MIQVQLKLRPNVKLEKRLDEWLWHLTGVYNWAVRKIQLDADDKIYHSPMNFQNLLAGHAKKVGVPGHCIQGVLSTVHAAWQRCFRKQGGRPKLKGQRNKLVSIPFPDPIRCPEGSHVKLPVLGLVRFHKQFLPEGRIKCGRLIKRASGWHLCLFIDAAPKEIERVGFGKIGIDPGFKSLLTFSTGEKVEHPRELEASAKRLAQAQRGKDKKLVARIHERIANQRKDRNHKLSRKLVAENTVIRFSKDNIKGIAKKFGKSVTSSGHGQLRAMLAYKSSHIGGTQYDEPASKNSTRICSNCGCLSGPTGWAGLSVRNWVCQECGSLHDRDQNAAINVLNFGAGTALERGLCQI

SEQ ID NO: 2469 - protein, 556 aa, Unknown
  Description of Unknown: uncultivated organism sequence
  Category: MG81 effectors
  Description: MG81-752 effector
MATRKKHIRTPYEDERKKHRAAASRHVLALEAQIKEDDKRKLFHIANDLRVYGNHLTNIAQKRVSQLFRTKAYREALKQYHNASSVLSSLDKGTPKYHEAKEKVKDAADVLERLQAQYKLTMEDLRHDMAGISKGGKIKAVFLLSETENVWAAVQSVLYKSGKHLNYAKRGELPLIRAKQIERGITLSFVNGVPRCKMGAIDDFALIVKKNDSFAKNELACIEAFVSDLETEKKAVAIFSKTGIPQNTYRPCFVALKCVTIRGKLRVYAHITVEGDPIPKYTKSGCLKHPCGKGLVGVDLGPQSVAAVSETSVILENLAERNGKSTKRHERKERLFLRALDRSRRANNKDRYNEDGTVKKGVHKPWKKSKQYRIKEACLKELRRKNALSRKYANNELANRIRAMGDDITIERSNVKALQKKAKPSVPEQGKKQKRRKRFGHSILHRCPGHLYAQLHSKFSENHFHVVDNMYRASQYDHKSNSYNKKKLSQRWHKFEDGTKVQRDIYSAFLLLCHNDDFKTINQDICILKYETFKKAHDKCISDIKTSGQKVCNSGI

SEQ ID NO: 2470 - protein, 383 aa, Unknown
  Description of Unknown: uncultivated organism sequence
  Category: MG81 effectors
  Description: MG81-753 effector
MPLSFTRTLRLKVRRESYAWLNAAAVEVNEIFNYCNETSLKAATRTDLKRKWMSGFDLCNLTAGSSQYFDKIGADTIPSICTHYAQKRQAAHRVKLRWRVSRGTRRSLGWVPFKAASLKHKGVCLRFAGKCFRVFERERLEGVKWQGGCFAQDAIGDWWLCLPVKVAAEETVAPEQAVGIDLGLKDIAATSDGGRLRAGHWTQEYAQKLAAAQRCGHKRQAKRIHRKVARCRTDALHKFTREIVDRYQKIVVGDVSSLKLVRTRMAKSVLDSGWGMLKRFLEYKSQQAARTFEVVNERNTSITCSTCGALSGPRGANGLIVRSWVCRDCGELHDRDVNAARNILIGSRYRTSMRGNESSPWLIPPSNAYCVREAGMESAWAAE

SEQ ID NO: 2471 - protein, 367 aa, Unknown
  Description of Unknown: uncultivated organism sequence
  Category: MG81 effectors
  Description: MG81-754 effector
MIQVQLKLRLRPAQERQLERWLFRLTGVWNWAIRKLEADGNVGVRHSVFEMKALVNGHGRKIGVPSKAMTALVAQACDAYDRYRGGLANRPRLKGRRNKLNSIPFDQGQLIRSDRSVYLAGLGLARFHPQEIPAGHSGCSRIVKRASGWYLCLFIQAEREPIAVVVDGLIGVDPGFSNLLTTSDGEIIEHPDELRAGELRVAQAQRGKRERLSARLRERGANRRRDRNHKLSRRLVAENRLIVWSKDNTAGIARSFGKSVSSASHSQLRQMLAYKSRAGGREFVEVASRNSTRICSACRAITGPTGYAGLSVRRWTCVCGATHDRDVNAAVNTLIAGLGMSHERSREVASGIVIESKPTRFMRGASQ

SEQ ID NO: 2472 - protein, 512 aa, Unknown
  Description of Unknown: uncultivated organism sequence
  Category: MG81 effectors
  Description: MG81-755 effector
MPTKQKEDSNRCVLTLPLLTEPWQEHIIEKRFKIIEHLKNQLISIELRKLKKLQRTKAYKNLIKQIESVPKSERTALYKERNKMLKDAGFSQYTFMDDMAGKKSLMQKHFESHINVQIAHKAAIDVWSSFEKFLFGTGQIVHYQKRGTLSSVASKSPKTGMFYYSDENIFKWSGGGTKPKGGIILCLRVASVKTNYEKEMVANNEIKYYRVVRKWMKTKYKYYLQITFAGKPADKHREISTGRVGIDIGTQTIAIASDKSVKLLELADKVNKNHIKKCELQRKLDRSRRYTNPDNFNPDGTVKRGTKGHKLKWNKSKHYIEIAGKIRELERKNADIRKYQHTCLANDILAMGNQIYIEPMNYKGLQKRAKETQVDEKGRYKKKKRFGKSLANKAPAMFVTILKTKAEQHGGEVYEVDIMSYRASQCDHTTGEYTKHGLNDRWRILGNGDKVQRDLYSAFLIKNSNKTHDEIDLDKCSKTYDSFKKLHDKEIENIRNEVILRKRRNISSYGIA

SEQ ID NO: 2473 - protein, 372 aa, Unknown
  Description of Unknown: uncultivated organism sequence
  Category: MG81 effectors
  Description: MG81-756 effector
MNHTKTLKVRVRDKHAPLLREMARSVNYVWNYLNELSHRSIRERGVFLSAFDMHPYTKGAGKELNLHSHTLQCVAAEYAARRKQFRKPRLNWRKSGGVRRSLGWIPINTGAASWKNGQVFHNGHHFTVWDSYGLGQYRFRSGSFSEDSRGRWYFNIAVDVPEFVGPLQQTESIGIDLGLKEVATCSDGFTRLENARFYRGLEPALAIAQRANKKARIRAIHAKIANRRKEALHQFSRSLLKRCGMIIVGDVSPQKLVKTTMAKSVLDAGWGQLKTMLDYKCAHAGIVFKVVNEAYTTQTCSCCGAISSSSPKGRAGLRIREWTCECGVTHDRDVNAARNILALGLSVPQGESTSFRTGRKSKIRTEGHSRDS

SEQ ID NO: 2474 - protein, 380 aa, Unknown
  Description of Unknown: uncultivated organism sequence
  Category: MG81 effectors
  Description: MG81-757 effector
MLQVQLKLRPCKAQEQIYDQWLYNLASVYNFAVRKIELNAKDKIYFSKNDFQNLLANHGEKLGIPSHTIQGVLCTVHDAWKRCFKKTAGKPKLKGMRNKMSSIPFPDPIKAPKGNRITLPGLGSVRFHKQEISEGKIKCGRLIKRASGWYLCLFIDAEPNPIKRLAFGAIGIDPGFSNLLTTSDGEVIEHPRELEAAAERLGQAQRGHNKQLAARIQERIANRKKDRNHKLTTKLVSENVLIVWSKDAIKGIAKRFGKSVNSSSHAQIRQMLSYKMPKSGGTFIEVASKYSTKTCNECGNPTGLAGLSVRQWECNVCGAQHDRERRYQHPCCCGRMCRRGLRLCVAVQESQTSSLGASNTSLMFSYIRILSRENFNDVKH

SEQ ID NO: 2475 - protein, 347 aa, Unknown
  Description of Unknown: uncultivated organism sequence
  Category: MG81 effectors
  Description: MG81-758 effector
MIICHKYRVKSLTGFLNFQAKSVNFVWNYCNDIQRHALKWGKQWPTAFDLIKLTSGSSLHLGILAKTIEGVCQKYATSRGRCRKRFLRYRGQKSLGWVPISKSSLSILEGGFKFSGKLFRVFDSRQLPPDAKIKDGSCFSKDARGNWFLNIVIEIADLSCREITKGVGIDLGLKEFATLSTGEKINNPHHFRALEESLAKAQRARKKRQAANIHARISSARHDFHHKLSTRIIREFDYIAAGNIKAAGLAKTSLAKSINDAGWSSFRNMLRYKAIGRGAVYEEVSEYLTTQTCHECGSIAGPKGQTGLNERTWICTCGAVHDRDHNAAINILMRGSGHGTPVEGIAV

SEQ ID NO: 2476 - protein, 426 aa, Unknown
  Description of Unknown: uncultivated organism sequence
  Category: MG81 effectors
  Description: MG81-759 effector
MIVLAIALDEIGFEILAHAAEDRPQVFDGPIRQHVASVFGDKDQMDVHLENAMSAGPVVLHFALRPIMFRGMMLTFKYRVKDATVGKHLNRHAWACNQVWNFCVATQREAQRRRQAGLTVRWPSAFDLVKLCTGSGTELGLHSDTVQTICRQFAASRDLHKRCPRFRASGGPKRALGWVPFIPRAVKVDGAHVVYLKRKFHFWKSRDIDGEFKAGSFVQDARGRWYVCFQCEVAEDRPTGNGEIGIDLGLKTLATCSDGTSIPALRHYRQYEAALARESRAGNKRRVRAIHAKIANARRNHLHEWSTKLARENELIVVGNVSPSKLAKTKMAKSILDASWAMLRSQLEYKARRHRARFVEADERWTSQSCSDCGAVGGPKGIAGLGVRHWTCPCCGSSHDRDVNAARNILSVGAERRPPAVEIPVL

SEQ ID NO: 2477 - protein, 366 aa, Unknown
  Description of Unknown: uncultivated organism sequence
  Category: MG81 effectors
  Description: MG81-760 effector
MTEDNTVLKTLKVRVKDNRKNILNRMAFDINQVWNKANEITSEECYEPIPEVGYVFNNISAFDIQKRIKGIRKERDMIIGAGSAQKIIAIHAKARKQFEKVKLKWRTSGGSRKSLGFVPFKSGAIKWVNGQIRFCGYYFKVWDSYGLSKYDFRSGSFSQDARGRWYLSIVVKVQQEKSKGTGQIGIDLGLKTTAVCSDGTTLERKQYYRNMESKLAMAQRANKKKQVKNIHAKIKNRRADTNHKFSTKLVKENSLIVVGNVSSSKLAKTKMAKSVLDAGWYQLKSMLDYKSKGMQVCYVEVNEAYTTQACSCCGCISSNSPKGMDSLGIREWTCAECGTKHDRDINAAENILRLGHQTLAGGIPRF

SEQ ID NO: 2478 - protein, 338 aa, Unknown
  Description of Unknown: uncultivated organism sequence
  Category: MG81 effectors
  Description: MG81-761 effector
MKLLTYKYRIKDSTSKKRLEKMARSVNQVWNYCNEVSILALKSKFVFLTAFDLNKLTTGVSKELGINVETVQATCEEYATRRKQFKKQKLKWRSSKKSLGWVPFKARSIKYLGNGEVKYFGHVFKFWESRSPLNIKCGSFNQDSKGNWHLNLVCEVEDDFLESTGKSVGVDLGLKDLATYSNGEKFSGVKATKKYADKLAKAQRARKKKQVTNIHKKIANIRKDSLHKETSRLVKQYDLIVVGDVSSKKLLKTNMAKSVSDASWDTYKSMLLYKTIRFGKELKVVNESWTSKTCHVCNTVANFGGLSGLSVREWTCSSCNTTHDRDVNAAKNILRLGQ

SEQ ID NO: 2479 - protein, 377 aa, Unknown
  Description of Unknown: uncultivated organism sequence
  Category: MG81 effectors
  Description: MG81-762 effector
MEVEIANCIRTLRLKVKPEAYASLNAAAVEVNRVWNFANETSAKAARPFAGPPKWLSAYDLDKLTAGATKYFERIGSETIQRVNAEFATRHKQVKKTKLRWRSSRGSRRALGWIPFKAVQLKRKGTSLRFSGKAFRVFEQACLSEVKWKCGCFSQDAVGDWWLSLPVEVRAEPTVAQNEEVGLDLGLKNTVATSDGDKLEASNFYRNIEQKISQAQRRGHKRQAKRLHRRAARRRKDTLHKFSRKIVNRYQRIIVGDVSSAKLVKTRMAKSVLDAGWGMLKAQLQYKANQAGKCVFIVSERNTTRACSNCRALTGPAGLDMLAVRAWVCSGCGGTHDRDVNAARNIRFAARCSPSVSGNEPSPSDTPPSQASRLREA

SEQ ID NO: 2480 - protein, 386 aa, Unknown
  Description of Unknown: uncultivated organism sequence
  Category: MG81 effectors
  Description: MG81-763 effector
MFDETVYIDRAEAVLSARAPALCESPMKPDNAPETHIQRQTITFKFRLRDRHAAELNRQARAVNYVWNYVNETQQKAARAHRKWLTAFDLQRLTNGASKELDIHAHTIQRVCRAYDDARKTHKKAWLRWRGRKSLGWVPFNTGHVSFDGADFKFRGVAYTPMHLRDLKPGVKIGAGSFNQDACGHWFLNIPVEVECALSAPLSSVGIDLGLHTMATLSTGEKIEAPRLYRASEEKLGTAQRARKTKRARAIHAKVANRRKDFLHKASAKIAKQFGLIIVGDVSPSKLAKTNMAKSVLDAGWSGFKNMLSYKANYRGGAMVEVSERYSSQTCSACGSLPPSRPKGIAGLGIRRWTCDECGAIHDRDVNAARNIVRAGLRTLVGGAHV

SEQ ID NO: 2481 - protein, 351 aa, Unknown
  Description of Unknown: uncultivated organism sequence
  Category: MG81 effectors
  Description: MG81-764 effector
MILTYKYRIKNRNAKSALRRHVFAVNQVWNYCCAQQRDTESRYRAGAPKRKWASHYDLTRLCKGAGAMLGIHQQTVSGVCRTFAQARDKAKHAPAFRKSYGVKRSLGWIPFEGQSRQIKDGVVTYLGKRFYLWGLKRRPLPATVKGGAFVEDALGRWYVCLTVEIERKPATGDKAIGIDLGLKSFATLDDGRKIEAPRIYRRYEQRLAALQRAGKRCHTKRLHAKIKACRADFLHKVSTELAGQNAIIAVGNVNARALASKSVLDAGWSSFRKMLAYKANDYREVDEKFTTQDCSACGARCGPKGQKGLGIREWECSSCGVSHDRDVNAARNILALARSAPRPVEEYRRAA

SEQ ID NO: 2482 - protein, 339 aa, Unknown
  Description of Unknown: uncultivated organism sequence
  Category: MG81 effectors
  Description: MG81-765 effector
MELRECFQVWRRQRVFLSAYDIHEYTKGAGEELGLHSQTLQVVGETHAKARKQAKRSKLRWRTNRKDAKHKALGWIPFKSSAVKVIRTYTTGQKVLKSQVQLSCGKEKLILTVFDQYDLRQYTEIKTASVVEDSCGNWFLCLVVKIEPAIENTATDEVGIDLGCKTAATCSNGDKLETKFIQQYAEKLAIAQRAHKKNRAKRIHRKIKNKRTDATHKFTSRLVKENRLIVVGNVKSSSFTSGKLAKSVYDANWFAINRQLEYKCEHAGCLFIKVNENFSTRTCSHCLAMPDSAPRGIAGLGIREWICNCCGHLNDRDVNAAKNILRFGRETLAEGSPVL

SEQ ID NO: 2483 - protein, 362 aa, Unknown
  Description of Unknown: uncultivated organism sequence
  Category: MG81 effectors
  Description: MG81-766 effector
MIVLTYKYLVKGKRAKRQLRRASWAVNQVWNFCGQTQRSVQRAWKDGLSPRWPSRFDLAHLAAGTSKDLGIHGQTIQCVAAQFAKSRDQHRKCPRFRHSGGPKRSLGWVPFQAQSRQIEGNAITYLGTTYRFFASRPLPLIVKGGAFVEDARGRWWVCFHVGVANDLPAAPDVAVGIDLGLKTLATLSTGEKYEAPRHYRVWEDRLAVAQRANDKDRARAINAKIKNCRHDATHKWTTEVARNFRMIYVGDVSSSRLVKTRMAKSIYDAGWSGSKHALRYKASRHGGTCVEQDERLSTQICSSCGMLCETRPRGIADLGMREWVCSNCGTHHDRDVNAAKNILAFGLSAQPPVEESRVAHGR

SEQ ID NO: 2484 - protein, 538 aa, Unknown
  Description of Unknown: uncultivated organism sequence
  Category: MG81 effectors
  Description: MG81-767 effector
MDNEEKEKDGATCCLTLPLKLEKWQSDHLEKRFEIARQLYNTLVHAELKKKCQVERMPEYQEIMKMIDTASNQKEKWALEKKRKAFLEENGFSRNAFKADMEKYYKHFNDNIGANVALHGITAQVWIAFDKVFVDNYKQKGKVHFKKPGELCSVQGYSQKKSGGKEIMFREDRIIWNQQGNRDRKKVKREFLLKLSPDNPYEAEMLKRHVKFVRILRKDGKTKPHWYAQLVLEGKPAVKRDPASGAPKHPIGHGVVGIDIGTRTLAYSTDKEVNLLELADRVQNIEQEKRRLQRKMDRSRRATNPENYNPDGTFKRGVKLTRNKSKRYKRIQHQYAMIQHHQADIRKQQHNELANYLLTLGDCFFVENMSYCDLVHRANKTEISEKTGRYKRKKRFGKSIANKAPAMLITMLKQKCQSRGLEGVKEVDTHVRASQYNHQTDTCIEKALENRWNVMPDGERIQRDLYSAFLLQHCRRDLPEYNRKELQKEFGEELYRVFDREALQRDYPQFVAYHHMTIQRLSELPHTIPSMGIRRIIS

SEQ ID NO: 2485 - protein, 355 aa, Unknown
  Description of Unknown: uncultivated organism sequence
  Category: MG81 effectors
  Description: MG81-768 effector
MVTTIKLRLKDKHSTDLSRQSRTVNFVWNFVNETQRESVRRYRLGASGKFLSKYDYAKLCYGTGKELSVASGTIEEITRQYETSRRTHRKPWLRWRGRKSLGWVPFRGRQIRFDGEQFIFAKRKYRPMHLRDTLTPETKVLTGSFNADARGRWYINVTVELPDDTHPRAPDVPVGVDLGLKDLATLSTGAKVHNYKPYREREEELAKAQRANKKKRVRAIHAKIANSRKDTLHKASTEIARNHSLIFVGDVSSKQLARTRMAKSVLDAGWYDFKSMLTYKAIRHGGRMVEVDERYTTQGCSHCGLVGGPKGAKDLGMREWTCSGCGTNHDRDVNAARNILRVGTDTLEGGASNQS

SEQ ID NO: 2486 - protein, 522 aa, Unknown
  Description of Unknown: uncultivated organism sequence
  Category: MG81 effectors
  Description: MG81-769 effector
MKRSSTDTCCLTLPLKLEKWQSDRLEKRFEIGRQIYNTIVHAELKKLRKLERTQQYQEIEQKLENAKQEETKELWKKKRQLLDQNGLSENHFKADMKYYYPHFKDNIASSVAVHGIASQAWTAFEKVLFSKDGKMVHFKKKGELSSLRGYSQAGKSGGIEIIFRGSYVEWKGLKLPLKLSPDNDYETEMLSKRVKYVRILRKEGKTKPHWYAQLVLEGKPAIKRDPASGAPKHPVGHGVVGIDIGTRTLAYSADSKVDLIELADRVQNIEQEKMLLQRKLDRSRRATNPENYKPDGSIKQGVKLTWNNSKRYKRIQHQYAMIQHHQADIRKQQHNELANYLLTLGDCFFVEDMDYRALTRKAKKTEISEKTGRYKRKKRFGKSIANKAPSMLIALLDQKCKSLNLEGVKKVDTAVKASQYNHQTDECKAKELKERWNIMPDGERIQRDLYSAFLLQHCRRDLPEYNRKELQKEFGEELYRVFDREALQRDYPQFVAYHHMTIQRLSELPHTIPSMGIRRIIS

SEQ ID NO: 2487 - protein, 538 aa, Unknown
  Description of Unknown: uncultivated organism sequence
  Category: MG81 effectors
  Description: MG81-770 effector
MNNEEKEKDGATCCLTLPLKLEKWQSDHLEKRFEIARQLYNTLVHAELKKKCQVERMPEYQEIMKMIDAASNQKEKWALEKKRKAFLEENGFSRNAFKADMEKYYKHFNDNIGANVALHGITAQVWIAFDKVFVDNYKQKGKVHFKKPGELCSVQGYSQKKSGGKEIMFREDRIIWNQQGNRDRKKVKREFLLKLSPDNPYEAEMLKRHVKFVRILRKDGKTKPHWYAQLVLEGKPAVKRDSASGAPKHPIGHGVVGIDIGTRTLAYSTDKEVNLLELADHVQNIEQEKRRLQRKMDRSRRATNPENYNPDGTFKRGVKLTRNKSKRYRRIQHQLAMIQHHQADIRKQQHNELANYLLTLGDCFFVENMSYCDLVHRANKTEISEKTGRYKRKKRFGKSIANKAPAMLITMLKQKCQSRGLKGVKEVDTHVRASQYNHQTDTCIEKALENRWNVMPDGERIQRDLYSAFLLQHCKQGLPEYNRKELKKEFGEELYRVFDREALQRDYPQFVAYHHMTIQRLSELPHTIPSMGIRRIIS

SEQ ID NO: 2488 - protein, 578 aa, Unknown
  Description of Unknown: uncultivated organism sequence
  Category: MG81 effectors
  Description: MG81-771 effector
MAFGSKNSTPSFVLTLPLDISLNEQDYLYKEFKKCGTIYNQLVSVTTKMWHQLRKMRKYRELMAAIAKAAPDSDEQKVLFKQREKMLKEYRFSEDAFHKLVVPYARHYAINSHIAQAVASDVWKAWNTFFFSKGKEVHYKRLDDLAAISGKNNFTGIVLRPANFTTSNIESAKRKAQKAVEKRYDDMYGRPDPKDDKKVVLPDEVKPQMEAEIAAAIAKIKPTIGKGNLRIVYGKHEFPVVLRNPKTQTGKYQQEALKCGVKYCRITRKWVKTKWKYYAQFILEGYPPTKCDGNGVMKHPVNQGRIGLDIGTQTLAISGKDICDLRVLAPSARAQARGLTNQIARTQRAMDRSRRVTNPKYYNPDGTIKRLKRQHGHKQRRDWKYSKRYFRLKAKLRDLNRRLADIRKMEHNILANELLQHGNEFVVEDMNYKALQKRSKETKTNAKTGRAHTKKRFGKSLSRCAPAMFISILNKKANRYGGSVIKVSTFETKASQFDHTDESYTKKRLSERMAHLSSGEVVQRDLYSAFLLEYIDTESLEYNTKALNSAFPAFLVMHENTIKHLQKDKSYLPASVGF

SEQ ID NO: 2489 - protein, 482 aa, Unknown
  Description of Unknown: uncultivated organism sequence
  Category: MG81 effectors
  Description: MG81-772 effector
MPEYQEIMKMIDTASNQKEKWALEKKRKAFLEENGFSRNAFKADMEKYYKHFNDNIGANVALHGITAQVWIAFDKVFVDNYKQKGKVHFKKPGELCSVQGYSQKKSGGKEIMFREDRIIWNQQGNRDRKKVKREFLLKLSPDNPYEAEMLKRHVKFVRILRKDGKTKPHWYAQLVLEGKPAVKRDPASGAPKHPIGHGVVGIDIGTRTLAYSTDKEVNLLELADRVQNIEQEKRRLQRKMDRSRRAMNPENYNSDGTFKRGVKLTRNKSKRYRRIQHQLAMIQHHQADIRKQQHNELANYLLTLGDCFFVENMSYCDLVHRANKTEISEKTGRYKRKKRFGKSIANKAPAMLITMLKQKCQSRGLKGVKEVDTHVRASQYNHQTDTCIEKALENRWNVMPDGERIQRDLYSAFLLQHCKQGLPEYNRKELKKEFGEELYRVFDREALQRDYPQFVAYHHMTIQRLSELPHTIPSMGIRRIIS

SEQ ID NO: 2490 - protein, 538 aa, Unknown
  Description of Unknown: uncultivated organism sequence
  Category: MG81 effectors
  Description: MG81-773 effector
MNHEEKEKDGATCCLTLPLKLEKWQSDHLEKRFEIARQLYNTLVHAELKKKCQVERMPEYQEIMKMIDAASNQKEKWALEKKRKAFLEENGFSRNAFKADMEKYYKHFNDNIGANVALHGITAQVWIAFDKVFVDNYKQKGKVHFKKPGELCSVQGYSQKKSGGKEIMFREDRIIWNQQGNRDRKKVKREFLLKLSPDNPYEAEMLKRHVKFVRILRKDGKTKPHWYAQLVLEGKPAVKRDPASGAPKHPIGHGVVGIDIGTRTLAYSTDKEVNLLELADHVQNIEQEKRRLQRKMDRSRRATNPENYNPDGTFKRGVKLTRNKSKRYRRIQHQLAMIQHHQADIRKQQHNELANYLLTLGDCFFVENMSYCDLVHRANKTEISEKTGRYKRKKRFGKSIANKAPAMLITMLKQKCQSRGLEGVKEVDTHVRASQYNHQTDTCIEKALENRWNVMPDGERIQRDLYSAFLLQHCKQGLPEYNRKELKKEFGEELYRVFDREALQRDYPQFVAYHHMTIQRLSELPHTIPSMGIRRIIS

SEQ ID NO: 2491 - protein, 368 aa, Unknown
  Description of Unknown: uncultivated organism sequence
  Category: MG81 effectors
  Description: MG81-774 effector
MYKTLKLRIYTKHTPKLVKLASAVNFVWNYVNDLCLQMWRRNRVFLSAYDVSEYTKGAGEELGLHSQTLQAIGEKHYQSRKQHKKVKLAWRTNRKDAKRKALGWIPFKASAVSHVKTYKTGKKALKSQVQLSCGKEKLILTVFDQYDLRQYTEIKTASVVENSCGNWYLCLTVKVEPAIENTATGEVGIDLGCKTAATCSNGDKLETKFTQQYAEKLATAQRAHKKKQVKRIHRKIKNKRTDATHKFTSSLVKENRLIVAGNVKSSSFTSGKLAKSVYDANWFAINRQLEYKSRRAGCLLIKVNEKFSTQTCSNCLQITNSSPKGVAGLGIREWICDCCGTKHDRDVNAAKNILRFGRETLAGGSSVL

SEQ ID NO: 2492 - protein, 405 aa, Unknown
  Description of Unknown: uncultivated organism sequence
  Category: MG81 effectors
  Description: MG81-775 effector
MKKQDVSSHRRSAPAEAPVKRNEPNAGLFTRTLRLKVRPESYAWLNMAALEVNSVWNFANERASTALGNLGKWLSGFDLNNQTSGATEYMKYIGADTIQRVNGEYAAKRNAARKQKLRWRVSRGAHRSLGWVPFKAASLKRKGNALRFAGKTFRMFESERLDSVKWRQGCFAQDALGDWWLCLPVIAEAAQSVAPREAVGIDLGLKAVATTSDGDALEAARFYRGAEQKIAQAQRRGHKRQAKRLHRKAARRRVDALHKFSRKIVDQYQKIVVGDVSAPKLARTWMAKSVLDSGWGMLKAQLLYKGEHAGRTVEVVDERYTTRACSACGSLSGPQGPDMLVVRRWTCADCGASHDRDVNAARNILRRAEVSASVSGNESCDSLVPPRGKRIRRREAGTKTARHAA

SEQ ID NO: 2493 - protein, 365 aa, Unknown
  Description of Unknown: uncultivated organism sequence
  Category: MG81 effectors
  Description: MG81-776 effector
MLFIHRPGIITVMVQCQIKLCLTRAQEAELDRWLWHFTGVYNWAIRKIGCDAAGGIYYRKRDFQNLLAGHGRKLGIPFHTLQGVLVQVRTASDRCGKRLDKNPRLKGHRNRLNSIPLPDPIKRPDGCRIKVPSIGSIRFHKQDIPDGRIKCGRIIKRASGWYLALSVDAQPNIVRTFKMKAHREVGIDSGYMAIVTLSDGERVDAPKECSAMEKRLTQAQRSGNRKLVEQLHEGIVSRKKDRNHKLSRYLVGTCAVMTFVHDNNQALQQKPGKSVANANIHQLQKMLAYKSSSFGRWFELMDGSWSTRTCSAYGSLAGPKGRHGLSVRRWVSEAYGASHERDIDTARNALISAVGSVVEEARDAA

SEQ ID NO: 2494 - protein, 357 aa, Unknown
  Description of Unknown: uncultivated organism sequence
  Category: MG81 effectors
  Description: MG81-777 effector
MSIVQYQLKLILRPAQERQLRRWLWHLTGVYNWAVRKIELDAADRRYWSTYSLEALLVGHSRRLGIPARVLERTARQGHDAWRRCFSKLGGQPRLKGRRNRLNSIPFPDPIAFFTGRRVRVSGLGSLKCHYQAIPPGRIKASRIVRRASGWYLCLFVEAEPRAIELNGNGEVGIDPGFGSLLTLSTGEKIEHPHELKETAIRLAQAQRGYRKRLTARLQERIGNQRKDRNHKLSRRLVAENAVIGWSKDAHQNIAKRFGKSVASAAHGQLRQMLAYKSRAGGREFIEVPSRNSTRACSACRALTGPTGWRGLKVRQWVCVGCGCEHDRDVNAALNTLIAARGLRVEKPGDGPSGMAA

SEQ ID NO: 2495 - protein, 364 aa, Unknown
  Description of Unknown: uncultivated organism sequence
  Category: MG81 effectors
  Description: MG81-778 effector
MKTLKLRIKDKHANQLNTLAGAVNFVWNYVNDLSFKHLQRTNHFFSAYDIAAYVKGSGELLNLHSQTLQAITETHAKSRKQFKKAKLNWRTNNPKSKRKSLGWIPFKKTAIKYLGVKKAGKKSLKSTIQFSLAKGKKLTIDVWDSYNLALYTINTCELVQGSRGHWYACITVKEYPKIECGTGETGIDLGCKDSAMTSNGEVLKTKVTQQYAKKLGIAQRAKNKQRVKAIHAKIKNTRQDLIHKFTTNLAKTNKIIIIGKLQSKSFTRGKLAKSVYDACWFEIKRQLTYKCENAGCYYDEVNESYTTQTCSCCGSRQNSPKGRTGLGIREWLCECGVTHDRDINAAKNILALGLERLAVGIPSL

SEQ ID NO: 2496 - protein, 349 aa, Unknown
  Description of Unknown: uncultivated organism sequence
  Category: MG81 effectors
  Description: MG81-779 effector
MLQVQLKLRPCKAQEQIYDQWLYNLASVYNFAVRKIELNAKDKIYFSKNDFQNLLANHGEKLGIPSHTIQGVLCTVHDAWKRCFKKTAGKPKLKGMRNKMSSIPFPDPIKAPKGNRITQPGLGSVRIHKQEITEGKIKCGRLIKRASGWYLCLFIDAEPNPIKRLAFGAIGIDPGFSNLLTTSDGEVIEHPRELEAAAERLGQAQRGHNKQLAARIQERIANRKKDRNHKLTTKLVSENVLIVWSKDAIKGIAKRFGKSVNSSSHAQIRQMLSYKMPKSGGTFIEVASKYSTKTCNECGNPTGPTGLAGLSVRQWECNVCGAQHDRDINAAINTLAAAAGCAVEGYAYV

SEQ ID NO: 2497 - protein, 358 aa, Unknown
  Description of Unknown: uncultivated organism sequence
  Category: MG81 effectors
  Description: MG81-780 effector
MIQYQRKLKLTKVQEAQLNTWLFHLTSVWNWAIRKIELDARDKVYYSRKTFQNLLTGHSGKLGIPSHTIQGMLDQTWLSWQRCFKKISRKPRFKGRRNKLNSIPFPDPIKPPLNNRVRMPLLGLVKFHKQDIPEGKINSGRIIKRASGWYLCLNINAQPNVIPHVSDDQVGIDPGYVTLLTLSTGEKIEHPKELQNNLIRLGQAQRGINRKQVARLHERIKNQRKDRNHKISRELVSKNQVIAISKDNLGGLARSGFGKSVGAAAHGQLRSMLSYKCRAGGREYIEVPSKFSTMTCSTCGARSGPTGKSGLKVRYWECNVCGTVHDRDVNAAINTLIAGLGISHESYREVASEIREVA

SEQ ID NO: 2498 - protein, 369 aa, Unknown
  Description of Unknown: uncultivated organism sequence
  Category: MG81 effectors
  Description: MG81-781 effector
MIQVQLKLKLKREQETMINEWFPILTSIWNWAIKKIEKDAADHIYYNKFEFINILAGHNKRLGMPSHTIQAMLKDAHTTWQRCFKKLARAPRLKGQRNRLTSISFPDPIKEAHINRTYVELPYLGKLKYHKQRIPIGKVKCARLVKRASGFYLCLFIDAQSNRIAHKGCELIGIQLSVDGRMALSNGDIIQREAQLQKHLNRLAQAQRGGNKKLVARLHERIANCRKDANHKLSRKIVEQYDTIVVNKDDLKQRARNLGLLVADSANYQLRLMMCYKSENNERKYIEFASKTGTDNAMISTVTCSVCRSPSGPASLTCLKVREWVCVSCGTLHDRDVNTAKNTLIAGLGASHESDASRVRNLLTSHYEL

SEQ ID NO: 2499 - protein, 355 aa, Unknown
  Description of Unknown: uncultivated organism sequence
  Category: MG81 effectors
  Description: MG81-782 effector
MKTLKLRIKDKHCKVLNQLASEVNFVWNYVNDLCFKHLQRKGQFFSAYDVAKYTKGTSKECNLHSQTIQAVTEELVIRRKQFKKAKLKWRVSNKKSARRSLGWIPFKKVAIKYADGYVQYGKHQFKLWDSYGLSKYTVKTGSFVEDSRGRWYVCLVVDSSKQEKLTATKAIGIDLGLKNIATCSDGTVIFNPKFYRQYEQKLGIAQRAKNKKRVRALHAKIKNCRKDHLHKASSILVKNNALIVIGDLSASKLVKTKMAKSVLDTGFSALKTMLKYKCENAGVLFEEVSEKFTTQVCSSCGEITASSPKGRADLRIREWRCCNEKCLSLNDRDINAALNILALGHKRLAVGISLF

SEQ ID NO: 2500 - protein, 355 aa, Unknown
  Description of Unknown: uncultivated organism sequence
  Category: MG81 effectors
  Description: MG81-783 effector
MKTLKLRIKDKHCKVLNQLASEVNFVWNYVNDLCFKHLQRKGQFFSAYDVAKYTKGTSKECNLHSQTIQAVTEELVIRRKQFKKAKLKWRVSNKKSARRSLGWIPFKKVAIKYADGYVQYGKHQFKLWDSYGLSKYTVKTGSFVEDSRGRWYVCLVVDSSKQEKLTATKAIGIDLGLKNIATCSDGTVIFNPKFYRQYEQKLGIAQRAKNKKRVRALHAKIKNCRKDHLHKASSILVKNNALIVIGDLSASKLVKTKMAKSVLDTGFSALKTMLKYKCENAGVLFEEVSEKFTTQVCSSCGEITASRPKGRADLRIREWRCCNEKCLSLNDRDINAALNILALGHKRLAVGISLF

SEQ ID NO: 2501 - protein, 1330 aa, Unknown
  Description of Unknown: uncultivated organism sequence
  Category: MG81 effectors
  Description: MG81-784 effector
MKREKNITIMKISKVNHRRTAVALNGDKSELGGILYEAPVQKDKNGNYNDVIAETGKVVNEALDKKSRLYTPFNNQKVIIDKNLQRYANNLKRCYINFVKQYVNNKSFNYKAMQFIPDIQNPKTNDAVNYRTDRDNVYNKNKYYDKQTKSKSKKFIYEKIVIPQNEQNIVISALVNCSLRKSLRKDVSYKTKSGEIKTYNLPELVKKSMRFYCLEGQREPDEKEKYEMYILFSYMKEDKRTKNTDLLVKSISNQNTKVKVEDIDGNKLLKLSIADTKKKPLWEYLIKYADSSRQRELMYDIRKKIILYVAGIEEYENIKEDSGLSKVSWSKYNISDNKMFFDINSCTDKRKQNLEIKIREANIEHYRNASSKLCDDESIFWFQHFEGVIETLFSKKSKISEERLGCAYICDYLWKDFLSYLATKYIDLGKGVYHFTMKDKLDMLNKNEAVTDLRFGIVSEKYEKGITSFDYERIKAEEELDRNIAAYVTFAADIFAKSVIKSDYRTKKDNNSDVLQYSDKEFRNSEVIRDNAEKNILQYWGGYSRWGTENSKLPENNKVSDFGKLDVSDLCIDIKKHLAGIRNSSVHYTTKIKNESAADGSNVKILFEKDLADINIIYADKYYSNNVWMFYSLEDINKLIAFLYKEKRVIRQVQIPSFSRILKRKAMQDVINEIFKDDFDENIVNPELKEKYRNSLYFMLKEIYYNAFIIQPELKEKFKDKIKTMTSELYNKLKTIDKKEYKALYCMLSNEESALKNFADRIYSVDGDNVSFADICKILMTDYNMQNQEKKNIESMEQKKKNKGKDENYKHFPLLLHKVLKELFIEYLKQTHELEFLRNNICIKSDVTMESFESQIKGVEIYKDLKEKIDKNNSLLDWYVIAHFLMPKQLNHLIGNIKNYIQFATNIDKRAESVKNLIESGMVKRIQYYDDIVRTLEFSAQYIGKISNNINDYFNSEDEYVSFLSKYVGFINDKSEDVLTELKDFCREKINNGSQIIGIYYGGDNVIINRNVIYAQMYSNAEVFSNIYKKVTKNDIINYYEKQNDLKDVFKSGVCQNEGEQRSLCEFQQLKNRIELTELSTYADMVNDFMAQFVEWAYLRERDLMYFQLGIHYIRLFYSDNVLDEKYHKLSDNVIDIEEGALLYQIVAMYDYELRIFETDNSGNAKRIGQGGPGKSIPVFLKKYCNGTDVYECGLELFEDINQHEHIIRFRNDIAHMRYMSNQAMNIMSIVSNIYKSFFVYDTKLKKSISLVFKNILMRYGVIADLVFSYNNKNQSIKDDMDINIINIKNLKSDKYVYKIVNEDIVKQVEIEIRNQVFLEQLHNLLYFSR

SEQ ID NO: 2502 - protein, 352 aa, Unknown
  Description of Unknown: uncultivated organism sequence
  Category: MG81 effectors
  Description: MG81-785 effector
MKTLKLRIKDKHYKVLDQLALEVNFVWNYVNDLGFKHLKRKGEFLSAYDIAKYTKGTSKECNLHSQTVQAITEELVTRRKQFKKAKLKWRVSNKKSARRSLGWIPFKKVAIKYADGYVQYGKHQFKLWDSYGLSKYNVKTGSFVEDSRGRWYVCLVVDKTKQVKSKGNTSIGMDLGLKDLVTCSDGVKLKAPQIYRQYEQKLGIAQRARNKKRVKAIHAKIRNIRQNTLHQFSHKLVNKHAAIFVGNVNAKALARTKLAKSVLDASWTTLRTMLKYKCENASVWYKEVNEAYTTQTCSSCGSRCSSPKGRTGLGIREWQCMECGTFHDRDINSALNILALGHERLAVGIPVL

SEQ ID NO: 2503 - protein, 514 aa, Unknown
  Description of Unknown: uncultivated organism sequence
  Category: MG81 effectors
  Description: MG81-786 effector
MGNSSTDTCCLTLPLKLEKWQEDRLAKRFELARQIYNTLVRAELKKLERVKHSAPYREIQGQIQALDWSNPNDKGALRRLYKARDALLKSAGFTEYSFKSDIKYYYKHFSDNIGSNVAIHGIAPQVWTAFDKVLFNGGKKVHYKRYGDVSSVQGYSKTRKSGGTEIMFRGTYIEWKGLKLPLKLSPDNAYENEMLRYRIKFVRLVRKPGKQKDRWYAQLALEGKPVVKREPVTGEAVHPVGSGVVGLDIGPQTLAYSAPGEAGLVELADQVQNIEQAKCRLQRKLDRSRRATNPDNYSEDGTIRRGVKLTRNKSKRYRKIQNQLKYLQYCQAETRKRQHTQLANYLLSLGDSFYVEDMPWPALARRAKETVVSEKTGRIKRKKRFGKSIANKAPATLTRILNQKCTSLGLPGVVEVPTSVRASQYNHQTGEYIKKPLSQRWNNMPDGQRIQRDLYSAFLLQHYDPGTGTFDSASLQRDYPQFTQYHHQAIQHLLSMPKTLSSMGVRQSVRQYKA

SEQ ID NO: 2504 - protein, 381 aa, Unknown
  Description of Unknown: uncultivated organism sequence
  Category: MG81 effectors
  Description: MG81-787 effector
MLIIFVNKGSTSLIQVQLKLKLTHTQETMIQEWFPILTSIWNWAIKKIELDAADHIYYNKFEFVNMLANHNKRLGIPSHTIQAILKDAHTTWQRCFKKLARAPRLKGQRNRLTSVSFPDPIKKAHVNSTSIELPYLGKLKFHKQIIPSGNIKCARIVKRASGFYLCLFVDAQSNRIAHKGCEAIGIQLSVDGRMALSNGDIIQREAQLQKHLNRLAQAQRGGNKKLVARLHERIANCRKDANHKLSRKMVEQYDTIVVNKDDLKQRARNLGLLVADSANYQLRLMMCYKSENNDRKYIEVASNTSTAGATISTVTCSVCRSPSGPTSLTCLKVREWVCVSCGTLHDRDVNTAKNTLISGLGASHESAAKRVRNLLTNHYEL

SEQ ID NO: 2505 - protein, 348 aa, Unknown
  Description of Unknown: uncultivated organism sequence
  Category: MG81 effectors
  Description: MG81-788 effector
MIQAQLKLRLNTKQDAILTGWLWNLTGVWNWAVKKIELDAKDKIFYSPKEFHNLLAGHSEKMEIPSHTLQGMLSQAHLAWSRCFKKLAKKPHLKGLRNKLNSIPFPDPLRAPVGNHIAVPGLGSVRFHRQDIPEGKIKCGRIVKRASGWYLCLFIAADREPIAHTAHGQIGIDPGFKSLLTTSEGEIIEHPRELEAGAQRLAQAQRGNDRTLAARLQERMGNRRKDRNHKLSRQLVAENDLIAFSADNHKGVANKFGKSVSSSSHYQLRRMLSYKSRAGGTEYVEVDSKFSTKTCSNCGSLSGPTGWAGLSIRQWRCTECGTLHDRDVNAARNTLQAALGTRVEVCCA

SEQ ID NO: 2506 - protein, 538 aa, Unknown
  Description of Unknown: uncultivated organism sequence
  Category: MG81 effectors
  Description: MG81-789 effector
MNNEEKEKDGATCCLTLPLKLEKWQSDHLEKRFEIARQLYNTLVHAELKKKCQVERMPEYQEIMKMIDTASNQKEKWALEKKRKAFLEENGFSRNAFKADMEKYYKHFNDNIGANVALHGITAQVWIAFDKVFVDNYKQKGKVHFKKPGELCSVQGYSQKKSGGKEIMFREDRIIWNQQGNRDRKKVKREFLLKLSPNNPYEAEMLKRHVKFVCILRKDGKTKPHWYAQLVLEGKPAVKRDPISSAPKHPVGHGVVGIDIGTRTLAYSTDKEVNLLELADRVQNIEQEKRRLQRKMDRSRRAMNPENYNSDGTFKRGVKLTRNKSKRYRRIQHQLAMIQHHQADIRKQQHNELANYLLTLGDCFFVENMSYCDLAHRANKTEISEKTGRYKRKKRFGKSIANKAPAMLITMLKQKCQSRGLEGVKEVDTHVCASQYNHQTDTCIKKALENRWNIMPDGERIQRDLYSAFLLQHCRRDLPEYNRKELQKEFGEELYRVFDREALQRDYPQFVAYHHMTIQRLSELPHTIPSMGIRRIIS

SEQ ID NO: 2507 - protein, 536 aa, Unknown
  Description of Unknown: uncultivated organism sequence
  Category: MG81 effectors
  Description: MG81-790 effector
MNDEKYKKLLKQYHKLSDRHILVVETDMPYPDVLKVIALSDKIRKAGNELVSLMRKNYDQLMRTKKYRKLLKLYGNTKDKDKRKAIANQLNDMQKSYNVTWNFCRTSMIPIGKKYSIDAVFALTKAEDIWRGMEKCLYDNGKTIHLSKYGKLPCIRAKQIDRGIPMFVEDSKLRFKLKKMQFGIQVNDRFQSDEANAVLSYLENSDKMDADAVNTLIEEACCIDTYRPCYATLVPRLIRGKYRVYLHLTIEGKAKPKYDKFGNPRHKYGKGMIGADIGTQTVAYTSDTEVGLKNLSERGNSIQTSERKERLYYRAMDRSRRATNPQNYNPNGTIKKGKKTWKYSNHYKKLKAKHAELCRVNAVNRQLAINEDANYLRSLGDTFVTEPKNASKLMKRAKKTTVNSKGKFNKKKRFGKSIKNRCPSGFQTTVEKKFKITGGTYIEVPNNYRASQYDHTADDYIKKKLSDRLYRLRDETLVQRDWYSSFLLYCYDYRTQNIDKDKCITDFGRCYDKEKALIAWIKANHIKILNSGIKVT

SEQ ID NO: 2508 - protein, 380 aa, Unknown
  Description of Unknown: uncultivated organism sequence
  Category: MG81 effectors
  Description: MG81-791 effector
MRFFCEEKTRAGGKMIQRQLKLKLTPAQQRKCEAWLFRAAGIYNWTIRKMEQDAHGGKYWTAYGLIYEIAGHSKKCDVPAKIIQGTVARAHQAWERCYKKLSKKPRLKSARNKMSGLDIPSDVRRACERITIPGLGKVRYHKDMLPEGKIKACRILKKTSGWYLAVCLEAAPNTIQRTASGRIGIDPGFSSLLTTSDGVKFEHPREMEASAARLARAQRGGHKRTAARIQERIANQRRDRNHKLSRKLVRENELIVFSADRHKAIAKMFGKSVASSAHAQLRSMLAYKSRTGGTRYVEVDSRFSTKTCSACGCLSGPSGFSGLAVREWTCTECGTRQDRDVNAALNTLLSGAGRASKSEIAFCERRESDARMKRASAAQT

SEQ ID NO: 2509 - protein, 511 aa, Unknown
  Description of Unknown: uncultivated organism sequence
  Category: MG81 effectors
  Description: MG81-792 effector
MAKCSTDTCCLTLPLRLEKWQEDRLAKRFEIARQIYNTMVRAELKKLRAMEQSEPYKANQEKIQALDRKTQTDKQALKALYKERDKLLRDGGFSEYGFKSDIKNYYKHFNNNIGSNVAFHGIAPQVWAAFEKMLFKKEGKKVHFKKKGDIHSLRGYSAAGKSGGVEIIFRETYIEWKGLKLPLKLSPDNIYETQMLSYRVKYVRLLRKPGKRKDRWYAQLSLEGKPVIKYNPKTGEVRHPIGKGAVGLDIGPQTLAYSAATGADLVELANQVQNVEQEKRRLQRKLDRSRRATNPGNYADDGTIRRGIALTHNKSKRYLRTQQELKYLQHQQAEIRKRQHTELANHLLSLGDCFYVEKMVWTSLTHRAKETEISEKTGKIKRKKRFGKSVANKAPATLIGILQRKSAALGIPGVIEVPTSVKASQYNHQSGTYTPKPLSQRWNNMPDGERIQRDLYSAFLLQHYNPQTNTFDANSLHQDYPQFVQYHHDAVLRLYAMPKAPSSMGIKRSLR

SEQ ID NO: 2510 - protein, 578 aa, Unknown
  Description of Unknown: uncultivated organism sequence
  Category: MG81 effectors
  Description: MG81-793 effector
MAFGSKNSTPSFVLTLPLDISLNEQDYLYKEFKKCGVIYNQLVSATTKMWHQLRKTRKYRELMAAIAKATPDSDEQKTLFKQREKMLKEYRFSEDAFHKLVVPYAKHFAINSHVAQNVASAVWTAWEGFFFSKGKAVHYKKLEDVASISGKNNATGIVLRPANLTTSNIESAKRKAQKAVEKRYDDMYGRPDPKDDKKVVLPDEVKPQMEAEIAAAIAKIKPTIGEGSLRIVYGKHEFPVVLRNPKTQTGKYQQEALKCGVKYCRITRKWVKTKWKYYAQFILEGYPPTKCDGNGVMKHPVNQGRIGLDIGTQTLAVSGNDICDLMVLAPSARAQAKSLVNEIARTQRAMDRSRRATNPKYYNPDGTIKRLKRKYGQKQKRDWKYSKHHYRLRAKLRDLNRRLADIRKMEHNILANELLQHGNEFVVEDMNYKALQKRSKETKTNAKTGRAHTKKRFGKSLSRCAPAMFISILNKKANRYGGSVIKVSTFETKASQFDHTDESYTKKRLSERMAHLSSGEVVQRDLYSAFLLEYIDTESLEYNTKALNSAFPAFLVMHENTKRRLQAVGSSLPASIGF

SEQ ID NO: 2511 - protein, 369 aa, Unknown
  Description of Unknown: uncultivated organism sequence
  Category: MG81 effectors
  Description: MG81-794 effector
MSASVQNARVPTGTRSGSVIQVQLKLRPNVKLEKRLDEWLWHLTGVYNWAVRKIQLDADDKIYHSPMNFQNLLAGHAKKVGVPGHCIQGVLSTVHAAWQRCFRKQGGRPKLKGQRNKLVSIPFPDPIRCPEGSHVKLPVLGLVRFHKQFLPEGRIKCGRLIKRASGWHLCLFIDAAPKEIERVGFGKIGIDPGFKSLLTFSTGEKVEHPRELEASAKRLAQAQRGKDKKLVARIHERIANQRKDRNHKLSRKLVAENTVIRFSKDNIKGIAKKFGKSVTSSGHGQLRAMLAYKSSHIGGTQYDEPASKNSTRICSNCGCLSGPTGWAGLSVRNWVCQECGSLHDRDQNAAINVLNFGAGTALERGLCQI

SEQ ID NO: 2512 - protein, 368 aa, Unknown
  Description of Unknown: uncultivated organism sequence
  Category: MG81 effectors
  Description: MG81-795 effector
MKTLKLRIRDKHIAKLNHLSGAVNFVWNYVNDLSYKHLKKTGKFFSAYDLNDYTKGSGELVGLHSQTIQAINETHAKSRKQSKKAKLSWRTNNPNAKRKNLGWLPFKQSAIKHIATHQTGKKGLKSTLQLSLAKGQKLIIDLWDSYNLSLYQINTCELVQDSRNRWYACITVKDYPKKSCGGGSVGIDLGLKDSATASNGDKLQIKQTLKYAKDLAIAQRAKNKKRVKAIHAKIKNTRNDLIHKFTSQLVKDNALIVIGDVKTTQFNSKKGKLAKSVYDAGWFELKRQLTYKCENAGCRFEIVSERYTTQICSCCGEISANSPKGRANLGIREWTCAKCGTWHDRDINASKNILAVGLHRLAEGIPSL

SEQ ID NO: 2513 - protein, 371 aa, Unknown
  Description of Unknown: uncultivated organism sequence
  Category: MG81 effectors
  Description: MG81-796 effector
MRIVYHMKSKTQIKTLKVRIKDKHAAILNQWAFEVNQVWNAANELSADYSWVPIPEVGYINCGTSEYDLQKELKTIRAERNFSISAVTIQSVISQHAKSRRQFKKNKLQWRCSSGSKRSLGWVPFKSAGVKFINGQVRFCGKLFSIWDSYDLSKYELGTGSFSQDSRGRWYFNTTIKVEIKSSEGKTSVGIDLGLKTIATCSDGTVFERRRITDEFAKELATAQGAKKKNRVRAIHAKIKNTRSDAIHKFTTTMAENYGAIFIGDVSSKKLTKTKMAKSVLDAGWGMLKTQLKYKAIARSVMFEEINEKYTTQICSCCGVISGNSPKGRAGLGIREWICCECGAIHDRDINAAKNILALGHERLAVGISVL

SEQ ID NO: 2514 - protein, 358 aa, Unknown
  Description of Unknown: uncultivated organism sequence
  Category: MG81 effectors
  Description: MG81-797 effector
MILTFKYRIKDATVGKYLDRHSRSVNFVWNYCCETQRKVEAYYKAGAPKRRWPSHFDLVKLTTGCAAELGLHSDTVGQICKQFVISRNAARHAPRFRASRGPKRALGWLPFIKRTVKLDGAHVVYLKRKFHFWKSRDIPDAIKTGCFTQDARGRWYVCFQCEVADDLPTGNGEVGIDLGLKTLATCSNGDTISALRHYRKYEATLAIAQRAGHKQRVRAIHAKIANVRKDQLHKASSKIAAENQLIVVGNVSAAQLAKTRMAKSVLDASWSMLRNMLEYKASRHRARYVEADERWTSQVCSCCGTIPDSSPKGMGALGIRHWVCSDCGCSHDRDANAARNILRVGAERRPPVEEIPAL

SEQ ID NO: 2515 - protein, 367 aa, Unknown
  Description of Unknown: uncultivated organism sequence
  Category: MG81 effectors
  Description: MG81-798 effector
MIVRELKLKLTSNQVSKLNTQLFYLTGVYNWAVRTIELNAVNKIYYSKFDFVNLLANHSKTLGIPSHTLQGILEQAFIAWQRCFKKLAKKPRLKSVRNKLNSIPFPDAISGTRITDKTIGIPGLGQVRFYKQDLPKGKVKCARAVRRASGWYLQLSIDAQHHFPIKETFDKVGIDTGFKHLAVLSNGTKFENQRNFIKGQKRLAQAQRGSNKKLVARLHERTKNRRKDYNHKISRQIVEAFQEIYITNDNLQSQSKMFGKSVHDAGINQLKQFILYKGDTHGRKCVLVDSKNTTMTCSNCGILSGPTGLIGLVVRNWECSACGAQHDRDINAAKVILNTGLGWSLENTETHAVKPEIFRLESSGGAR

SEQ ID NO: 2516 - protein, 536 aa, Unknown
  Description of Unknown: uncultivated organism sequence
  Category: MG81 effectors
  Description: MG81-799 effector
MIDEEYSKILKQYHKLSDRHILAAKTDMPYSDVLKVVALSDKIRKAGNELVGLMRKNYDQLLRTKRYRKLLSLYGGTEDKAKRKNYANQLNEMQKSYNVTWDYCRTSMIPIGKKYGIDAVFALTKAEDVWCGIEKCLYGNGNIIHFSKYGELPCIRAKQINRGIPMSVKDDKLQFKLSKTSFGIQINDRFQQDEVNVILSYLAEPEIMDNKAVNTLIEDACCIDTYRPCYATLVPKMIRGKYRVYLHLTIEGKAKPKYDKHGNLRHKYGKGMIGADVGTQTVAYTSDTEVGLKNLSERGRSIQYSERKERLLFRAMDRSRRATNPQNYNDDGTIKKGHKVWKRSNHYKKLKARYSELCRINAVNRQLAINEDANHLRSLGDTFITEPKNAGRLMKRAKEATKNDKDRFNKKKRFGKSIKNRCPSGFQTTVEKKFKVTGGTYIEVPSNYRASQYDHTADDYIKKKLSDRLYKLRDGTEVQRDWYSSFLLYCYDYRTKDIDKDKCITKFNGCYNKEKALITWIKAHKIKVLNSGIKIA

SEQ ID NO: 2517 - protein, 367 aa, Unknown
  Description of Unknown: uncultivated organism sequence
  Category: MG81 effectors
  Description: MG81-800 effector
MYQVLKLRIYRKHYVKLDKLSSAVNFVWNYVNNLCWQMWRRKRIFPSAYDIHEYTKGAGEELGLHSQTIQFIGEKHYQSRKQHKKVKLAWRTNRPDAKRKSLGWIPFKASAISHVKTYNTGKKALKSQVQLSCGKEKLILTVYDQYDLRRYNGFRTAEIVQDSCDDWYLCLLVKVEPKVCTATGEVGIDYGCKTAATCSNGDKLETKLTKQYAEKLATAQRAHKKNQAKRINRKIKNKRADATHKFTSKLVKENRLIVAGNVKSSSFTSGKLAKSVYDANWFAINRQLEYKSRRAGCQFIVVDEKFSTQTCANCLQITNSSPKGVTGLGIREWICDCCGQLNDRDVNAARNILRFGRETLAEGSPVF

SEQ ID NO: 2518 - protein, 495 aa, Unknown
  Description of Unknown: uncultivated organism sequence
  Category: MG81 effectors
  Description: MG81-801 effector
MSHLRPSRSRNGSPRGIEAGGVIAHNRIEARRQPQQPLQIANFSDLAGVPERAGMMPSPTVTNSRMDETETTDPMDVCNAVDSAALACEGDSTGTWVTRTLRLKVKKNSYAWLNAAAAEVNQVWNWAAEISTKAARPCTGNAKWLTGFDLDKLSSGASKYFHKIGADTIQRVNGEYALKRKAAGRLRLRWRASAGSRRALGWVPFKAESLKRKGRAVRFCGKQIRVFEWKRLEGVKWKQGCFAQDAVGDWWLCLPHALRIEESVAPLEKVGVDLGLKDVAATSDGMRCEKGLFFRGIEKKIAQAQRRGHKRQAKRLHRTASNRRRAALHRFSRRIVENYQKIVVGDVSSTQLVKTRMAKSVLDSGWAMLKTMLQSKGQQAGRIVQIASERYTSSSCSSCGSLSGPHGVNGLRVSHHGTTGSRLRSAVDYAVGRERTVAQSHIRMGAGDEEITIYRFGCPCRNDCSGDSGTRGRSAQPGHDPQSAGVGPPAHRQAG

SEQ ID NO: 2519 - protein, 363 aa, Unknown
  Description of Unknown: uncultivated organism sequence
  Category: MG81 effectors
  Description: MG81-802 effector
MLQVQLKLRPCKAQEQIYDQWLYNLASVYNFAVRKIELNAKDKIYFSKNDFQNLLANHGEKLGIPSHTIQGVLCTVHDAWKRCFKKTAGKPKLKGMRNKMSSIPFPDPIKAPKGNRITLPGLGSVRFHKQEISEGKIKCGRLIKRASGWYLCLFIDAEPNPIKRLAFGAIGIDPGFSNLLTTSDGEVIEHPRELEAAAERLGQAQRGHNKQLAARIQERIANRKKDRNHKLTTKLVSENVLIVWSKDAIKGIAKRFGKSVNSSSHAQIRQMLSYKMPKSGGTFIEVASKYSTKTCNECGNPTGPTGLAGLSVRQWECNVCGAQHDRERRYQHPCCCGRMCRRGLRLCVAVQESQTSSLGASKH

SEQ ID NO: 2520 - protein, 503 aa, Unknown
  Description of Unknown: uncultivated organism sequence
  Category: MG81 effectors
  Description: MG81-803 effector
MAKCKTATCSLTLPLRVEKWQIDKLDKRFEIARKIYNIFVGFELKKLNRLKQTPEYREILHEIKLKNQDKEKNKAEIKALYNKRNAILKQWNFTELRFTNDMTTMNKYYSSNFGAITSQSISNDAWRAFNTLLFGKGEQIKFKKIGAVNSVSGKSFNREIRLIPSKNCIEWKGLTLPYRVERGNLYEEKMLSHKVKYVRILRKWANTKYNYYAQIVLEGVPEPKINKKTGELLHPIGEGRVGLDIGPQTIAYVSDTEVGLTELADKVVSIEKEKRRLSRKLDRSKRATNPTNYNQDGITKHGVKLTHNKSKRYLITQEELKTLYRKQADIRKLQHNILTNKLLSLGSEFYVEKMSIIGLARRAKKTEISEKTGKFKRKRRYGKSITNKAPAMLLQILNNKLKAQSLSKLIEIDTYNAKASQFDHINETYTKKSLSQRWTKLDNGDEIQRDLYSAFLIQNTDNTLKAFDKVLLNEKYSNFKIMHDAFINQLKEQSTYHPTSMGV

SEQ ID NO: 2521 - protein, 348 aa, Unknown
  Description of Unknown: uncultivated organism sequence
  Category: MG81 effectors
  Description: MG81-804 effector
MQLTYRFRLRDKHCSELNRQSRAVNFVWNYCNETQRNAARSSKKWLSGYDLMKLTAGTSGDLGLHGHTIQKTCAQYDKSRRQHKKPWLRFRGKKSLGWVPFNTGQVAFDGASFAFRGVRYEPMHLRDLAPGVKIGIGSFSADSRGRWYINVLVEVPGAAVVPASAVGIDLGLKSLAVLSNGEAIESPRFYRNHEAALATLQKAHKAKRTTAIHAKVANRRKDFLHKASATIARENGLIVVGDVSPSKIAKSRFAKSSLDASWADFKRMLSYKAIRHGGTFLEVDEAYSSQTCSTCGSRPESRPKGIAGLGIREWTCSDCGAVHDRDVNAALNILRAGQRTLAGGAHAA

SEQ ID NO: 2522 - protein, 364 aa, Unknown
  Description of Unknown: uncultivated organism sequence
  Category: MG81 effectors
  Description: MG81-805 effector
MKTQTKTLKVRIKDKHADVLNRMAFECNQVWNAANETSAEFSWVPVPEVGYMNMQTSGFDLMKELKGIRNDRDMIIGAGTVQEVIAVHAKARKQFKKNKLRWRSSGGARRALGWVPFKSGAAVWVNGQIRFCGIHFKCWDSYGLSQYNFRSGSFSQDARGRWYFNIVVQVEVEERIAGNGQIGIDLGLKTTATCSNGDTLERQNCYRNSEAKLGKAQRANKKKQIQTIHAKIKNRRADAIHKFSNKLVKENSLIVVGNVSASGLAKTKMAKSVLDAGWAMLKIQLDYKSKGMQGVFIEVNEAYSTQACSCCGTISANSPKGRAGLGIREWSCPDCGTTHDRDINAAKNILRLGHQSLAVGIPVL

SEQ ID NO: 2523 - protein, 514 aa, Unknown
  Description of Unknown: uncultivated organism sequence
  Category: MG81 effectors
  Description: MG81-806 effector
MGNSSTDTCCLTLPLKLEKWQEDRLAKRFELARQIYNTLVRAELKKLERVKHSAPYREIQGQIQALDWSNPNDKGALRRLYKARDALLKSSGFTEYSFKSDIKYYYKHFSDNIGSDVAFHGIAPQVWTAFEKVLFKGGKKIHYKQYGDVSSVQGYSKTRKSGGREIMFRGTYIEWKGLKLPLKLSPDNAYENEMLRYRVKYVRLVRKPGKQKDRWYAQLALEGKPVVKREPVTGEAVHPVGSGVVGLDIGPQTLAYSAPGEAGLVELAAQVQNIEQAKCRLQRKLDRSRRATNPDNYSEDGTIRRGVKLTRNKSKRYRKIQNQLKYLQYCQAETRKRQHTQLANHLLSLGDSFYVEDMPWPALARRAKETVVSEKTGRIKRKKRFGKSIANKAPATLTHILKQKCTSLGLPGVVEMPTSVRTSQYNHQTGEYIKKPLSQRWNNMPDGQRIQRDLYSAFLLQHYDPGTGTFDSASLQRDYPQFTQYHHQVIQHLLSMPKTPSSMGIRQSVRQYEF

SEQ ID NO: 2524 - protein, 348 aa, Unknown
  Description of Unknown: uncultivated organism sequence
  Category: MG81 effectors
  Description: MG81-807 effector
MIYRHLKLKLTKVQEESVHRWIPSLTSIWNWAICKIENDSKGGIYYSQKEFQNILCGTSKVLNIPSHTVQGVLISAHMAWQMCYKKAAKKPRFKGNRNRLNSIPFPDPFRVPKDNRITVPGLGRVRYHKQDIPEGKIKCGRVVKRASGWYLCLFIDAEPAKISGTGEGAVGIDPGYKHLLTLSTGEKVAHPKELQHSIKRIGQAQRGGNKRLVARLNERIANQRKDRNHKLSHRLVAENAVIAFSKDNIKGLSRAGFGKSVAAAGHGQFRLMLAYKSRAGGRQYIEVPSKGSTRTCSTCGASTGPQGRAGLSVRQWTCSACGTPHDRDVNAAINTLNAALGMSVERAI

SEQ ID NO: 2525 - protein, 387 aa, Unknown
  Description of Unknown: uncultivated organism sequence
  Category: MG81 effectors
  Description: MG81-808 effector
MKTLKLRIKDKHATQLNRLSSSVNFVWNYVNDLGYKYLQRTGKFLSAYDLNDYTKGSGELLGLYSQTIQAINETHAKSRKQFKKAKLNWRTNNPNSKRKSLGWIPFKQSAIKHIATHQTGKKGLKSTLQLSLDKGKKLVIDLWDSYNLSLYQINTCELVQDSRNRWYACITVKNYLKQTCGTGSVGIDLGLKDSATTSNGDKLQIKQTLKYAKDLAIAQRAKNKQRVKAIHAKIKNTRLDLIHKFTTGLIKQNALIVVGDVKSNQFNSKKGKLAKSVYDAGWFELKRQLDYKCKYAGCQLEMVNESYTTQTCSCCRQIDSNSPKGRTGLRIREWTCAKCSTWHDRDINAGKNILAVGLDRLGAGIPERQGGEEVKGHAHPSHLYECE

SEQ ID NO: 2526 - protein, 1330 aa, Unknown
  Description of Unknown: uncultivated organism sequence
  Category: MG81 effectors
  Description: MG81-809 effector
MKREKNITIMKISKVNHRRTAVALNGDKSELGGILYEAPVQKDKNGNYNDVIAETGKVVNEALDKKSRLYTPFNNQKVIIDKNLQRYANNLKRCYINFVKQYVNNKSFNYKAMQFIPDIQNPKTNDAVNYRTDRDNVYNKNKYYDKQTKSKSKKFIYEKIVIPQNEQNIVISALVNCSLRKSLRKDVSYKTKSGEIKTYNLPELVKKSMRFYCLEGQREPDEKEKYEMYILFSYMKEDKRTKNTDLLVKSISNQNTKVKVEDIDGNKLLKLSIADTKKKPLWEYLIKYADSSRQRELMYDIRKKIILYVAGIEEYENIKEDSGLSKVSWSKYNISDNKMFFDINSCTDKRKQNLEIKIREANIEHYRNASSKLCDDESIFWFQHFEGVIETLFSKKSKISEERLGCAYICDYLWKDFLSYLAAKYIDLGKGVYHFTMKDKLDMLNKNEAITDLRFGIVSEKYEKGITSFDYERIKAEEELDRNIAAYVTFAADIFAKSVIKSDYRTKKDNNSDVLQYSDKEFRNSEVIRDNAEKNILQYWGGYSRWGTENSKLPENNKVSDFDKLDVSDLCIDIKKHLAGIRNSSVHYTTKIKNESAADGSNVKILFEKDLADINIIYADKYYSNNVWMFYSLEDINKLIAFLYKEKRVIRQVQIPSFSRILKRKAMQDVINEIFKDDFDENIVNPELKEKYRNSLYFMLKEIYYNAFIIQPELKEKFKDKIKTMKSELYNKLKTIDKKEYKALYCMLSNEESALKNFADRIYSVDGDNVSFADICKILMTDYNMQNQEKKNIESMEQKKKNKGKDENYKHFPLLLHKVLKELFIEYLKQTHELEFLRNNICIKSDVTMESFESQIKGVEIYKDLKEKIDKNNSLLDWYVIAHFLMPKQLNHLIGNIKNYIQFATNIDKRAESVKNLTESGMVKRIQYYDDIVRTLEFSAQYIGKISNNINDYFNSEDEYVSFLSKYVGFINDKSEDVLTELKDFCREKINNGSQIIGIYYGGDNVIINRNVIYAQMYSNAEVFSNIYKKVTKNDIINYYEKQNDLKDVFKSGVCQNEDEQRSLCEFQQLKNRIELTELSTYADMVNDFMAQFVEWAYLRERDLMYFQLGIHYIRLFYSDNVLDEKYHKLSDNVIDIEEGALLYQIVAMYDYELRIFETDNSGNAKRIGQGGPGKSIPVFLKKYCNGTDVYECGLELFEDINQHEHIIRFRNDIAHMRYMSNQAMNIMSIVSNIYKSFFAYDTKLKKSISLVFKNILMRYGVIADLVFSYNNKNQSIKDDMDINIINIKNLKSDKYVYKIVNEDIVKQVEIEIRNQVFLEQLHNLLYFSR

SEQ ID NO: 2527 - protein, 370 aa, Unknown
  Description of Unknown: uncultivated organism sequence
  Category: MG81 effectors
  Description: MG81-810 effector
MYITYRYRVKSLEGLLRKQAQAVNYVWNYCNETQKSYLRLGKKWLNHFDLTKLTTGVSKELGINSDTIGAICKKYVLSRRQHKRPFLRWRTKKSLGWIPLRGRHLEQTPNGFKYGGKIFKVFLSRPIPPVAKICDGSSFSEDARGRWYINLLLKLPDETVRPVQTAVGIDLGLKDLAVLSNGEKVETPKFFRGLEEKLGKAQRAKKKRLEKSIHAKISNSRKDFLHKLSTRIVKRFDWIAVGNVSSSKLAKTRMAKSVLDAGWSSFRSFLAYKALACGATFMEVNESFSTQVCSSCGCIPPESPKGIADLGIRNWTCGDCGAVHDRDVNSANNILFGSGCRTPVEGTLIENMKETSNPDLSKCEKVFTFK

SEQ ID NO: 2528 - protein, 578 aa, Unknown
  Description of Unknown: uncultivated organism sequence
  Category: MG81 effectors
  Description: MG81-811 effector
MAFGSKNSTPSFVLTLPMVIGLNEQDYLNKEFKKCGIIYNQLVNATTKMWHQLRKTRKYRELMAAIAKAAPDSDEQKALFKQREKMLKEYRFSEDAFHAMVVPYAKHYAINSHVAQSIATAVWTAWSSFFFDKGKGVHYKKLEYVSSISGKNNATGIMLRPANHTTSVINSAKTKAKNSIEKKYFAAYRKPDAKEGEEVVLPDEVKAQMEKEIAAATAKVKTSIGKGKLHITYGDYTFPVTLRNPDTQTGWYQQEALKCGVKYCRIIRKWVSTKWKYYAQIVLEGYPPIKCDNNGVAKHPVKQGRVGIDIGTQTIAFSGKDVCDLRVLAPAARAQAKSLVNEIASTLRAMDRSRRATNPKYYNPDGTIKRLKRQHGQKQKRKWKYSKRYYRLRAKLRNLYRKLADIRKMEHNILANELLANGNEFVVEDMNYKALQKRSKETKINPKTGRAYTKKRFGKSLSRCAPAMFISILGKKANRYGGSVIKVSTFETKASQFDHTDESYTKKKLSERMARLRSGDIVQRDLYSAFLLEHIDTESLQYNMETLNSAFPAFLEMHENTKRRLQTVGSSLPASIGF

SEQ ID NO: 2529 - protein, 383 aa, Unknown
  Description of Unknown: uncultivated organism sequence
  Category: MG81 effectors
  Description: MG81-812 effector
MPLSFTRTLRLKVRREAYAWLNAAAVEVNEVFNYCNETSLKAATRTDNKRKWMSGFDLCYLTAGATQYFDRIGAGTIQSICIHYAQKRQAARRVKLRWRVSRGARRSLGWVPFKAASLKRKGVCLRFAGKCLRVFERERLEGVRWQAGCFAQDAVGDWWLCLPVKVEAEETIAPQEAVGIDLGLKEIAVTSGGERLEAGRWTQGYAQKLASAQRRGHKRQAKRIHRKAARCRADALHKFSRRIVDRYQNIIVGDVSSLKLVKTRMAKSVLDSGWGMLKNFLDYKSQQAARSFKVVSERNTSVTCSACGALTGPRGVNGLIVRLWICSDCGESHDRDVNAARNILIGSRCRTSVSGNESSPWLIPPSSAYRVREAGIETARAAA

SEQ ID NO: 2530 - protein, 347 aa, Unknown
  Description of Unknown: uncultivated organism sequence
  Category: MG81 effectors
  Description: MG81-813 effector
MIQYQLKLRMCKSQEQQCEQFLYHLSSVWNWAVRKIELNAKDHIYFSKMEFQNFLANHSERIGIPSHTLQGVICTAHDAWKRCFKKIGGKPRLKGMRNKMSSIPFPDPIKAPKGNRIILPALGSVRFHKMDLPTGKIKCGRVVKRSSGWHLCLFIDAEPKAIERMGYGVIGIDGGFKDLLTLSTGEKIEHPRELEAAAERLAQAQRGHDTKLAARIQERIANQRKDRNHKLSHRLVAENVVIKFSADNHKAVARRFGKSVASSGHSQLQRMLSYKSPQSGTEYFEIAPKDSTKTCWVCGEPTGPTGLAGLSVRQWRCTTCGTFHDRDQNAAVNTLIAAAGCAVEVCI

SEQ ID NO: 2531 - protein, 352 aa, Unknown
  Description of Unknown: uncultivated organism sequence
  Category: MG81 effectors
  Description: MG81-814 effector
MTQTKTLKVRIRDKHAPMLRHMARSVNFVWNYLNELSQRSIRERGVFLSAYDMQKYTNGCAKELGLHSHTVQVVGKEYATRRLQFRKSRLNWRKSRGVRRSLGWIPLNTGAASWKNGQVYHNGNFFKVWDSFGLGHYRFRSGSFTEDARGRWYFNVVVDVEAKPSAGKHAVGIDLGLKTVATCSDGAALENARFYRDLEPALAIAQRAGKKARVRTIHAKIANRRKDALHKFSRSLVERCNLIVVGDVSPQKLAKTNMAKSVLDAGWGQLKTMLAYKCAHAGIVFREVSEAYTTQTCSCCGAMPGERPRGIAGLGIREWTWECGVTHDRDINAARNILAAGHRRLAVGIPAL

SEQ ID NO: 2532 - protein, 1668 aa, Unknown
  Description of Unknown: uncultivated organism sequence
  Category: MG81 effectors
  Description: MG81-815 effector
MDLHSDGDGERDHGIISPVKEKVEETLPEFICKGTYKGVPLCDDNKNRIRGRKGKYHLFVLLKSDAGKKHLLAENANMLVKDDWAANRYFHMASSVVNRLIFHNPLYSGGQMPAIKLDIATRATGDIDKMGNGIKEEFQKQKYRVKKGNNREYYSIMNADIYRTLIAQEMVNSGKINIRIEKLNIKSICYDSSGQGMEFLYLADSICSILGYRLTKTGSSADDWLVQIKERICDLNRDNENLIFGYDEIDNYFSNAWGQFENKDMFKALSVIYDAKWMKGEFAKHYQNEWFPFLEEQLRRRATPELFLQSVDQLHAFLQTNNIDQEKLLYIMQQLESMVEGVSNRFKSKESKERALYKLYDAGVAVYCHIGDATKAQGYYEKCRLHVVYVSLDDYMKTNNRLIVLLEDAFQWDEALNKAKENLDILQMIAKGATVSPKNFLDCLQKSAETIKFERRKKKSGNVVWVPVKLEEDYKKYGTSLQEQVEQAVHFNIKRSLSKETVIHSVCKILISFFQKNQITLKEEESRLLIQALDKDIRKEKQLKYIEKSIQLQNTKVQPVQVDGKTVLALSGAKHPKKKIIFDFLVRYANASQSDQENMLIQMRKWILLFVCGEQAYKEAEEKGISTRGFAAEHGDIPGTFGGDVYSKISDLQEIKKQDKGASERLKVSKLKKEIAAMINDTLTTVYREIKGMDGVAEEDMFWIEYIQKEVQKVLLKKNKLATGIEYKIQNKYLCNQVWKNWVSFIAGKYVDMGKGVYHFVMPECNSNINELEVCEVQDFYKKGISSFDYEMIKAEETLERDMAVAVTFAVNNFSRAIIKKESERTTSQNEDVLQYTEKEFEKYCDGENIHKNILQYFGGISKWEDCEIVHASGFEVFDTIKKNINCVRNASYHYSQNLEKREVRNKYVDMLCRHEVDNYTEIIKDKYYSNNLYRFYPESTLKRLMDELYSEVKERPAQIPAFNRIINKQKIAAFLSTVIKGNKLKKVIGNVEDASLFYPAMIFLLKEIYYNAFICNENCKKWVEEAALKNAENEKDKNKKEANKNFILRLEQLHTESFGDMCQQLMTALDLQNNRDHRVNTNADQLKYKHFRILLYNAIYEAFANFIKSKEQKLYSLYDAVREPVLQTNLKTREEFLSGWTAHRYDTKIDKITGNSILSAWYVTSHFLAPRQVNHLAGSMKNYRQFVNDIGDRRNKVESKQSYRKTEIYEDVVMVLELVDASSGQISNEVKDYFGSDEEYARHLSKYVDFSDEKAKNNMEEPSCRMLLQLFSENRQQTGDGDMIDIYYKNNVILNRNIVLSKMYGLDICENGWWQKVTLENDILNYYKLKRELSSGSKFTGTAVFEKGRCEFPEEQEKLKKFQNIKNRVELLDVMTYEEILIDLYSQLVSWAYMRERDLLYMQLGVAYLALNYGDKSYRTRSREMFGDDRLNSMEGPGPVNIKNGALLYQLIAMNNPCMTLYEVENGKATPAKKAGNSIGARVGCLYKGYLNCREEVYKNGLYFFENYQLHDYIVKHVRNEIDHFKYFRKPVKSLLELYSEIYTYFFTYDKKLQKSVTFILLNILEKYFVRAKIQMGYKKVEVKNDKKEMIPVIETDINIEKAHSLYMFYNQIKYREQDSKEDKKAYNDYKSRYDLDIGKGVLKLEARDDLFVKQLLELLSYKESMR

SEQ ID NO: 2533 - protein, 353 aa, Unknown
  Description of Unknown: uncultivated organism sequence
  Category: MG81 effectors
  Description: MG81-817 effector
MIQCQVKLKLTPRQGRQLDHWLRHLTSVWNWAIKKIENDGRDGIYYRSKEFQNLLAGHSRKLSIPSHVLQGVLSQAHGAWARCFKRITRRPRLKGRRNKFNSIPFPDPIRPPTGNSLTLFGIRRVRFHKQTIPSGVIKCGRIVKRASGWYLCLFIDAEPNAISPISNGEIGIDPGFSSLLILSTGEKIEHPRELEATEQRLAQAQRGNNKQLVSRLQERISNQRKDRNHKLSHRLVAENQVVAFSKDRHSAIAKRFGKSVASSGHYQLRQMLSYKSKCRTDGLGVYVEVDSRNSTKTCSACGCLSGPTGLAGLKVRQWTCADCGAQHDRDVNAAINTLIAGAGLAHEMSVRAA

SEQ ID NO: 2534 - protein, 352 aa, Unknown
  Description of Unknown: uncultivated organism sequence
  Category: MG81 effectors
  Description: MG81-818 effector
MIQIQLKLRPTPRQERRLGHWLRHLGSVWNWAIKKIEHDSRDCIYYSSLDFRNLLNSHGPKMDVAQDAICGTLWSAHTSWRRCFKKVSRKPRLKGRRNRFNSIPFAHGVKVIDGRLSVVRLGRIRFHKQEIPEGQISQFRLVKRASGWYACLFIKADGDAIFATADGCVGIDPGFSSLLTLSDGEVVEHPRELEASAKRLSQSQRGRNRKFTSRLQERIANQRKDRNHKLSRRLIAENQLIAFSADRHKSIAKRFGKSVASSGHAQLRQMLSYKSKRRTDGLGVYVEVDSRNSTKTCSACGCLSGPTGLAGLKVREWECAQCGTEHDRDINAAINTLIVGLGGSHERQAIAI

SEQ ID NO: 2535 - protein, 352 aa, Unknown
  Description of Unknown: uncultivated organism sequence
  Category: MG81 effectors
  Description: MG81-819 effector
MKTLKLRIKDKHCKVLDQLASEVNFVWNYVNDLCFKHLQRKQQFFSAYDIAKYTKGTSKECNLHSQTIQAVAEELVTRRKQFKKAKLKWRVSNKKNARRSLGWIPFKKVAVKYADGYVQYGKHQFKLWDSYGLSKYNVKTGSFVEDSRGRWYVCLVVDSIKTEKTTAKTSIGIDLGLKDLATCSDGVKFKAPKIYRQYEQKLGIAQRARNKKRVKAIHAKIKNLRQNMLHQFSHKLVNEHAAIFVGNVNAKALAQTKLAKSVLDAGWTTLRTMLKYKCENAGVWYEEVNEAYTTQTCSCCGSRSSSLKGRAGLGIREWQCVECGTFHDRDINSALNILALGHGRLAGGISVL

SEQ ID NO: 2536 - protein, 491 aa, Unknown
  Description of Unknown: uncultivated organism sequence
  Category: MG81 effectors
  Description: MG81-820 effector
MKKSNTDTCCLTLPLKLEKWQEDRLAKRFEIARQIYNTMVHAELKKLRNIENSQPYRQIQKQIEALNWKNQNDKARLKSLYNDRNKLLNTIGFSEYGFKADIKYYYKHFNDNIGSSVAVHGIAPQVWAAFEKMLFHKEGKKVHYKKKDDIHSLHGYSVTGKSGGVEIIFRKTYIEWKGLKLPLKRSPDNAYETEMLGRRVKYVRLLRKPGKRKDCWYAQLSLEGKPAIKRDPESGERRHSIGRGAVGLDIGPQTLAYSACGAADLVELADQVQNIEQMKRRLQRKLDRSRRATNPDNYADNGTIRRGVKLTHNKSNRYRRTQRELRYLQHCQAEIRKRQHIELANHLLALGDCFYVEDMAWPSLTHRAKETAISEKTGRIKRKKRFGKSVANKAPATLIGILEQKCNSLGLPGVVKVPTSLRASQYNHQSGEYTSKPLSQRWNNMPDGERIQRDLYSAFLLQHYDPKAGSFDSALLQQDYPQFVQYHHRAI

SEQ ID NO: 2537 - protein, 367 aa, Unknown
  Description of Unknown: uncultivated organism sequence
  Category: MG81 effectors
  Description: MG81-821 effector
MKTLKLRIKDKHANQLNKLAGSVNYAWNYVNDVSYKHLQKTGKFFSAYDLNEYTKGSGEYLGLHSQTLQAINETHAKSRKQFKKAKLNWRTNRPDAKRKSLGWIPFKKSAIKYLSTRQTGKKALKSTIQLSLSKGQKLIIDVFDSYNLSLYQINTLEIVQDSRNRWYACITVKDFPRQVSGKGSVGIDLGLKESATTSMGDVLTTKQTQKWAKKLAVAQRANNKKWVKAIHAKIKNSRLDLIHKFTTQLIKDNALIVVGYVKSRSFTGKKTKLAKSTYDAGWYELKRQLKYKCENAGCRFEIVNEKYTTQTCSCCGDMSSSPKGRAGLRIRGWTCAECGTWHDRDINAAKNILAVGLDRLAGGIATQ

SEQ ID NO: 2538 - protein, 352 aa, Unknown
  Description of Unknown: uncultivated organism sequence
  Category: MG81 effectors
  Description: MG81-822 effector
MIQCQLKLKLTARQERQLGHWLRHLTSVWNWAVKKIENDARNGIYYSRLTFRNLLNGHGRKIDVPQDALCGTLDTAYTAWRRCFKKQTRRPRLKGRRNRLNSIAFGHGTRVINGRVVIPRMGRVRFYKQAIPMGHIGQFRLVKRASGWYACLFIQADREAVPVVASGTVGIDPGFSSLLTLSTGEKVEHPRELEASTLRLAQAQRGSNKKLAARIQERISNQRKDRNHKLSRRLVAENQLIAFSADRHKSIAKRFGKSVASSGHAQLRQMLSYKSKCRTDGLGVYVEVDSRNSTKTCSACGCLSGPTGLAGLKVRQWVCVACGAEHDRDINAAVNTLIAGAGAVHEGQVIAA

SEQ ID NO: 2539 - protein, 344 aa, Unknown
  Description of Unknown: uncultivated organism sequence
  Category: MG81 effectors
  Description: MG81-823 effector
MARAVNYVWNYCNDIQKKAARSNRRWVNWVMLNNLTSGCSKELRLHSQTIQAIGECYATSLKEAKSPTGKKKRFLRFRGRRSQGWIPFKASGIKLRGDSAVYQGRRFKFWKTRDIPPTIKNGNFSCDSRGRWYLNLVCEYEETIVSNEGNVGIDLGLKSLATLSTGKKYDAQKFFRKYERKLAHHQRCNNSRQVQTIHAKIANSRKDFNHKVSHELTRDFNKIFVGDVGSLGLLKTKLAKSVSDASWGQLRTFIEYKAIARGGTYYVVDENNTTRTCSACGCLTGPSGLAGLRVREWQCKECGTVHDRDTNSAINIEQRGLLTLPSPLRTLSAKDSESLGIPRL

SEQ ID NO: 2540 - protein, 351 aa, Unknown
  Description of Unknown: uncultivated organism sequence
  Category: MG81 effectors
  Description: MG81-824 effector
MIQTQLKLRLSATKEAQLNDWLWSLTGIHNFAVRKIELDAKDGIFYPRMGFQNILAGHGGKIGIPSHVVQGMLAQVHTAWSRCFKKIGGKPKLKSARNKLNSIPFPDPIRSPNGNHIKLPGIGLICFHKQEIPVGDIKCGRIVKRASGWYLCLFIDAERKPIKRIACGRIGIDPGFKDLITTSDGEKVPHPKELQNKIARIGKAQRGVNRKLVARLHERVSNQRKDRNHKLSLRLVQENTLIVFSKDNIKGIAKKFGKSVSSSGHAQLRSMLNYKSRAGGSQYTEVNPRNSTRTCSSCGALTGPHGLAGLSVRQWECGCGVRHDRDVNAAVNTLLSGLECAANQGGLRDVA

SEQ ID NO: 2541 - protein, 348 aa, Unknown
  Description of Unknown: uncultivated organism sequence
  Category: MG81 effectors
  Description: MG81-826 effector
MQITLKLRLRDRHAAKLARHARAVNYVWNYCNERQRQAVRECRRWLSYPALAALTAGTSVDLDLHAHTIQRVCLAYAAARRAHKKPWLRWRGRRSLGWVPFNTGHVSFDGEAFTFRGVRYETMHLREIPTGAVIGAGSFNADARGRWYINLPVEVLEATSASITHVGIDLGLKDFATLSTGEKIAAPRFYRASETKLATAQRARKTRHARAIHRKIAARRRDFLHKTSVQLVKRFGLIFVGDINPSQLVRTTMAKSVLDAGWSNFRAMLRYKSRLRGGGVCLEVSEHLSTQTCSECGRLPASRPRGIAGLRERVWRCDDCGTVHDRDVNAARNILRLGQQTLGGGAHV

SEQ ID NO: 2542 - protein, 384 aa, Unknown
  Description of Unknown: uncultivated organism sequence
  Category: MG81 effectors
  Description: MG81-827 effector
MTGVFGTIFATSNFMARPSKSANRQAALGVTTRVLRLRIKDKHARVLSAMAREVNQVWNYCNETSHRAIRERSQWLSGYDLQKLTNGFSKCEGVQIGSPTVQQVCEDYAKARKQFKRAKLRWRVSNPKSSKYSLGWIPFKARALQYKAGQIAFAGQRLHLWDSYGLGDYELRAGSFSEDSRGRWYLNVVVKVSTKASTATASVGIDLGLKEAAVASDAQRIEGRFYRKLEARLGIAQRAGKKCRVKAIHAKIKNQRKDMLHKFSAAMVKDYGAIFVGDVASAKLVKTKMAKSTLDAGWASLKTMLEYKSHQAGVVFEVVSESYTTQTCSCCGSIPASSPKGRTGLRIREWVCSGCGAVHDRDVNAARNILAAGHRRLAEGISGV

SEQ ID NO: 2543 - protein, 536 aa, Unknown
  Description of Unknown: uncultivated organism sequence
  Category: MG81 effectors
  Description: MG81-828 effector
MIDGEYKKILKQYHKLSGRHILVAETDMPYSDVLKIVILSDKIRKAGNELVGLMRKNYDQLFRTKRYRKLLFLYGNTGDKVKRKILANQLNEMQKSYNVTWDYCRKSMIPIGKKYGVDAVFALTKAEDVWHGVEKCLYGNGRTIHFSKYGELPCIRAKQINRGIPISVKDNRLQFKLGKTTFGIQADDRFQTDEVNAVLAYLAEPEIMDKKAVNTLIEDAYCVDTYRPCYATLVPKMIRGKYRVYLHLTIEGKAKPKYDKYGNLRHKYGKGMIGADIGTQTIAYTSNIEVGLKNLSERGNSIQTSERKERLLYRAMDRSRKATNPQNYNDDGTVKKGHKTWKYSNHYKKLRARHSELCRINAVNRNLAIKEDVNHLRSLGDVFVTEPKNASKLMKRAIKTTKNYKGRFNRKKRFGKSIKNRCPGGFQSNVEKKFKATGGTYIEVPNNYRASQYDHTADDYIKKKLSDRLFKLHDGTEVQRDWYSSFLLYCYDHMTHDIDKNKCNTKFEEQYNREKALITWIKANKLKILNSGIKIA

SEQ ID NO: 2544 - protein, 356 aa, Unknown
  Description of Unknown: uncultivated organism sequence
  Category: MG81 effectors
  Description: MG81-829 effector
METTKTLKLRIKDKHARVLSAMAREVNTVWNFCNETSHRSIRERFKWLSAYDLQKLTAGYSKCEGVQIGSATAQLVCEEYALRRRQFKKAKLRWRVSNPKSSKYSLGWIPFKVGGVKYKAGQVVFAGHKLSLWDSYGLADYELRAGSFVQDTRGRWYLCVAVKVQVKPSTATGSIGLDLGLKEAAVASDGQRIEGRFYRKLEAKLGIAQRAHKKQRVKALHAKIANQRKDMLHKFSTRLTKEYGAIFVGDVSSQKLVKTKMAKSTLDAGWSMLKTMLEYKSQQAGVVFEVVNESYTTQTCSCCGSIPASSPKGRAGLRIREWTCSDCGAVHNRDTNAARNILAAGLRRLEAGITVL

SEQ ID NO: 2545 - protein, 420 aa, Unknown
  Description of Unknown: uncultivated organism sequence
  Category: MG81 effectors
  Description: MG81-830 effector
MVSETGLEPAPHAPNARALPTELLTEKMVCVNGFEPLISCFRGKWSNQTLLYAVINKLLQLCVILTPYMKTLKLRLKDKHASVLIAMAKEVNTVWNFCNETSHKAIVERKKFLTSYDLDKLTAGYTKIDGVKINSRVMQSVSVEYVSRRKQFKKNKLAWRVSNGKASKRSLGWIPFKVDTIVYKSGQVKFAGYKFSLWDSYGLSQYKFRSGSFNQDARGRWYLNIAVEIEPFVGPQPQKSQIGIDLGLKSAVTCSDGKVLIGRNYRKYEKAIALSQRARTKKKTRNIHAKIKNTRKDELHKLSNELVRKNSMIFVGNVNGSKLAKTKMAKSTYDAGWYMFKTMLEYKCNYAGAVFEVVDESYTTQTCSTCLRLSGPQNLKGLGMREWICCGCQSVHDRDINSAQNILAVGLGRLAEGIAV

SEQ ID NO: 2546 - protein, 389 aa, Unknown
  Description of Unknown: uncultivated organism sequence
  Category: MG81 effectors
  Description: MG81-831 effector
MNNPLMPLSFTRTLRLKVRREAYPWLTRAAFETNQVFNYCNEASLLAATRTDLKRKWLTGFDLCNLTSGATKYFEHIGADTVQSICVHFAQKRIAAKKLKLRWRASGGAKRALGWIPFKAASVKRKGNSLRFAGKMFRVFNRDYLGEHKFRDGCFAQDACGDWYLCIPVHMPVEQTVAPREEVGIDLGVKTIATTSDGEKLEGGRWTHGGADKLAMAQRRGHKKQAKRIHRRVANQRKDALHKFSRKIVDQYQNIIVGDVSSKKLVKTKMAKSVLDSGWGMLKNMLDYKSQQAARTFSVVNESYTSITCSSCGSLTGPRGVNGLIVRSWICSECGDSHDRDVNAARNILTAARLSPSVRGNESSDSLIPSSRLRKHRRETRTESVRTAA

SEQ ID NO: 2547 - protein, 511 aa, Unknown
  Description of Unknown: uncultivated organism sequence
  Category: MG81 effectors
  Description: MG81-832 effector
MSKRNTTDTCCLTLPLKLEKWQEDRLSKRFEIARQIYNTLVHAELKKLRQVEQSAEYRQIQVQLREMYQNNTTKTKEFRDIANRRRKLLDAAGFREYDFKSAIKDYYKYFKENIGSNVAIHGIAPLVWTAFENKLYKNGKKVHYKRPGDIYSLRGYSVTGKSGGSEIMFRGTYVEWKGLKLPIKRSPDNDYETAMLEYRVKYVRILRKPGKHKNHWYAQLSLEGKPVIKMNPVSNEPVHPIGSGAVGIDIGPQTIAYASQSEAGLLELASQVQNIERQKGLLQRKMERSRRDMNPENYMPDGTFRRGVKLTKNKSKHYCKLQRELAYLQHRQVETRKRQHIELANHLLSLGDCFYVEDMKWLSLTHRAKETEISEKTGRIKRKKRFGKSIANKAPATLIGILDTKCKSLGIPGVVKVPTIMKASQYNHQSDTYEKKPLGQRWNDMPSGERIQRDLYSAFLLQHLEPDLTGYNKKMLAQDYPQFVEYHNHVINDLSMKPKTLASMGIRRRVS

SEQ ID NO: 2548 - protein, 383 aa, Unknown
  Description of Unknown: uncultivated organism sequence
  Category: MG81 effectors
  Description: MG81-833 effector
MQGEDDVPPGAKLHRPNRLDALCQGRDHPYRPNGSEDLQLPRQGRDERLIALGDAVNTVWNYFNEISMRSAQRGPIWAAKKQLRVLTKGSGKLLGLPSQVVQEMINQYVIKRKAARRPKLRWRASRGPRRALGWVPFTNQDIALDGTTVLLRGQRFRLWLHRAVEGRIKSGNFSQDARGRWYCNLVCEVPRSQGRGRDDIGVDLGLKSVAKCSDGTGLEQAQFYRCLEPKLAEAQRKRRKRQVKSIHAKIANRRKDVLHKFSRALVDRARKITVGDVSASAMTKTRMAKSVLDAGWSTLRGMLRYKCDHAGVAYAEVNEANTTRTCSFCGRLSGPTGLAGLSIRRWTCGECGSEHERDQNAARNIARLGCETPCPSGHGSPGF

SEQ ID NO: 2549 - protein, 579 aa, Unknown
  Description of Unknown: uncultivated organism sequence
  Category: MG81 effectors
  Description: MG81-834 effector
MAFGNKNSTPSFVLTLPMKVTEQDEIFLSKKFRVGCTVYNQMVTKTTKMWHQLRKTREYKNLVKAIKAAPANSDKRKALLVQRSNLIKQAGFSEGAFHKLVVPYQKAYNVNCDVAQKVASAVWKAWDDFFYGKGKTVHYKKLDDFVTLSGKKNNSGIFFRPANHTVSSMKSAKRKAKNSIEKKYFDAYRKPNTKKDKEVVLPDEVKAQMDKEVADATTKAKPCIGEGNLRIIYEKYEFLVKLRNPDIQTGWYQQEALKCGVKYCRIVRSWVGTKWKYYAQLVLEGYPPIKCDSNGVVKHHVKQGRVGIDIGTQTIAFCGKDVCDLRVLAPSAIAEVCNGLTKEIARIMRQMDRSRRAMNPQYFNENGTVKRLKRKNGHKQIRHWNYSKNYYRLLHKLRNLNRKLADVRKMEHYILANELLTYGNEFIVEDMNYKALQKRNKKTKINPKTGRAHSKKRFGKSIGRCAPAMFISILNQKANRYGGSVIKVSTFETKASQFDHTDDSYTKKKLSQRFAKLSDGTVVQRDLYSAFLLLHLRKNLQSYNKKTIKKDFPQFKKLHDETKERLKSSHEWLPTSVGF

SEQ ID NO: 2550 - protein, 381 aa, Unknown
  Description of Unknown: uncultivated organism sequence
  Category: MG81 effectors
  Description: MG81-835 effector
MVSLETPLTTRTVEGGHDMARTKPTKSIIQCQLKLKLRPAQERMLNRWLWHLTAVFNWAYKTVEHNANQGIYLSRYDLESRLAFHSGRMGIPARVLDGAARTAHDAWQRCFQRLARRPRMKGRRNRLNSILFRQVINRVECDRIFVSGFGMVRFHRQEIPAGRITGARLIRRSSGWYFSLFVEASPRSIPVLSSGEIGIDPGFVSLISLSTGEKVEQALELKQTAMRLAQSQRGSDRRLTARLKEREANQRKDRNHKLSRRLLSENALICWSKDSHRAIARTFGKSVASAAHGQLRQMLAYKCRAGGREFIEVPNRYSTMTCSACGARSGPTGYAGLSVRQWTCGCGASWDRDVNAALNTLIAGRGLRLERVGDGSSGIVT

SEQ ID NO: 2551 - protein, 363 aa, Unknown
  Description of Unknown: uncultivated organism sequence
  Category: MG81 effectors
  Description: MG81-836 effector
MSIQTKTLSVRVKDRHAAVLRQMAFEVNQVFNLANEITSEAYSNAGVFGAQVPKWLTAFDVQKMTTGIQRERGYSIGSATVQEVIAHHGKARKQFKRSRLRWRVSGGARRSLGWVPFKSKQAQWQNGCVKFAGHYFKVWDSYGLAGYKFRAGSFSEDSRGRWYFNICVEVATVHTTGATAVGIDLGLKDTATVSDGSKLIAGRFYRDLQPALGKAQQAGKKARVRAIYAKIKNRRKDALHKFSTALVNSHAAIFVGDVSSSKLAKTKMAKSVLDAGWAMLKTQLEYKAIARSVVFEVVNERYSTQACSCCGAISNNSPKGRAGLRIREWTCCECGTAHDRDVNAAKNILAAGHCRLAVGIPVL

SEQ ID NO: 2552 - protein, 538 aa, Unknown
  Description of Unknown: uncultivated organism sequence
  Category: MG81 effectors
  Description: MG81-837 effector
MDNEEKEKDGATCCLTLPLKLEKWQSDHLEKRFEIARQLYNTLVHAELKKKCQVERMPEYQEIMKMIDAASNQKEKWALEKKRKAFLEENGFSRNAFKADMEKYYKHFNDNIGANVALHGITAQVWIAFDKVFVDNYKQKGKVHFKKPGELCSVQGYSQKKSGGKEIMFREDRIIWNQQGNRDRKKVKREFLLKLSPDNPYEAEMLKRHVKFVRILRKDGKTKPHWYAQLVLEGKPAVKRDPASGAPKHPIGHGVVGIDIGTRTLAYSTDKEVNLLELADRVQNIEQEKRRLQRKMDRSRRAMNPENYNSDGTFKRGVKLTRNKSKRYRRIQHQLAMIQHHQADIRKQQHNELANYLLTLGDCFFVENMSYCDLVHRANKTEISEKTGRYKRKKRFGKSIANKAPAMLITMLKQKCQSRGLEGVKEVDTHVRASQYNHQTDTCIEKALENRWNVMPDGERIQRDLYSAFLLQHCKQGLPEYNRKELKKEFGEELYRVFDREALQRDYPQFVAYHHMTIQRLSELPHTIPSMGIRRIIS

SEQ ID NO: 2553 - protein, 349 aa, Unknown
  Description of Unknown: uncultivated organism sequence
  Category: MG81 effectors
  Description: MG81-838 effector
MSTKVYRYRVKSLNGLLNKQARAVNFVWNFCNDTQKHALKWRKRWPTGFDLNVLTAGSSKELGIHSGTINAVCEQYAKSRKQFKRPYLRYRGKRSLGWVPLKGRDLKRHGDAFRFAGNTFRVFNSRPLPEGKIKDGTCFSQDRRGNWFLNIVVDVADAETRKPVRGVGIDLGLADLATLSNGEKIEHPRCFRQLEEKLAKAQRARKKRLVAKIHAKIANTRMDFLHKASTDIVRRFDYIAVGNVSSGKLAKTKMAKSVYDASWHSFKTMLAYKSVANGAWYKEVNESFSSQACSACGALPESSPKGIAGLRIREWVCSECGAVHDRDVNAALNILRSGRRAPVVGIPAL

SEQ ID NO: 2554 - protein, 512 aa, Unknown
  Description of Unknown: uncultivated organism sequence
  Category: MG81 effectors
  Description: MG81-839 effector
MPTKQKEGGNRCVLTLPLLTEPWQEHIIEKRFKIIEHLKNQLISIELRKLKNLQRTKAYKNLIKQIESVPKSERTALYKERNKMLKDAGFSQYTFMDDMAGKKSLMQKHFESHINVQIAHKAAIDVWSSFEKFLFGTGQIVHYQKRGTLSSVASKSPKTGMFYYSDENIFKWSGGGTKPKGGIILCLRVASVKTNYEKEMVANNEIKYYRVVRKWMKTKYKYYLQITFAGKPADKHREISTGRVGIDIGTQTIAIASDKSVKLLEFADKVNKNHIKKCELQRKLDRSRRYTNPDNFNPDGTVKRGTKGHKLKWNKSKHYIEIAGKIRELERKNADIRKYQHTCLANDILAMGNQIYIEPMNYKGLQKRVKETQVDEKGRYKKKKRFGKSLANKAPAMFVTILKTKAEQHGGEVYEVDIMSYRASQCDHTTGEYTKHGLNDRWRILGNGDKVQRDLYSAFLIKNSNKTHDEIDLDKCSKTYDNFKKLHDKEIENIRNEVKLRERKNISSYGIA

SEQ ID NO: 2555 - protein, 495 aa, Unknown
  Description of Unknown: uncultivated organism sequence
  Category: MG81 effectors
  Description: MG81-840 effector
MAGKSDKACCVLTLPLLTEPWQEHIIEKRFRIMEHLKNSLIALELRKLKNIQRTKQYRQLEAEISNAPKENRKTLYKKRNELLKNAGFSEFAFIDDMTNMQKHFVEHIATQIAHKSASDVWSSFEKVLFNTGRKIHFIRRGSLSSIACKKDGNGMRFRNGMLHWNGGQCKNKVKLELRVACPKTPYECAMLEKKIKYERIIRKWVKTRYKYYVQFTLDGNAVPKPRKMGTGRVGIDIGPSSIAIASSQEVRLMELADKINQNHLRKVALQQKMDRSRRATNPDNFNENKTIRRGVKLSWHYSKHYQKLRGQVRELERKNADIRKYQHTCLANYILSLGTEVYIEQMNFKGLQARAKETTYNKNGRANRKKRFGKSIANRAPAMLVTILETKLKSYAGTELHKVNTWSYRASQYDHITDTYTKKLLRQRWAELGNGDRIQRDLYSAFLLMNSQPSLQSTDRERCSKTYSQFKSLHDQEIYRLQQTPERHLSSFGIA

SEQ ID NO: 2556 - protein, 352 aa, Unknown
  Description of Unknown: uncultivated organism sequence
  Category: MG81 effectors
  Description: MG81-841 effector
MILTYKYRIKNRSAKSALRRHAFAVNQVWNYCCAQQRDIESRYRAGAPKRKWASHYDLQRLCKGAGAMFGIHQQTIGGVCRTFAQARDKARHAPAFRKSYGVRRSLGWIPFEGQSRQIKDGAVTYLGKRFYLWGLKRRPIPATVKGGAFVEDALGRWYVCLTVEVERKPATNDKAIGIDLGLKSLATLSDGRKIEAPQIYRRYEQQLATLQRAGKRRHAKRLHAKIKACRADFLHKISTELAGQNAIIAVGNVNARDLASKSVLDAGWSSFRKMLAYKAKDYREVDERFTTQDCSACGARCGPKGQKGLGIRQWQCSSCGISHDRDVNAALNILAIARRSAAPPAEEYRRAA

SEQ ID NO: 2557 - protein, 350 aa, Unknown
  Description of Unknown: uncultivated organism sequence
  Category: MG81 effectors
  Description: MG81-842 effector
MITYTLKLRLNTKQEATLNTWLFNLTGVWNWSIKKIEHNAQDKIYFSAFDFVNLLSDHGKKLGIPSHTIQGVLSQAYTAWSRCFKKIGGKPKLKGQRNKLNSVVFPDRIHPPKENHISIPGIGKIRYHKQMLPKGNIKCGRIIKRASGWYLCLFIDAERAAIIRTGYGKIGIDPGFKSLLTLSTGEKIEHPRELEAVEKRLGQAQRGHDKQLAARLSERRANQAKDRNHKLSLRLVKENVLIAFSADNHKGIAKKFGKSVSSSGHYQLQKMLSYKSRIGGTEYREIDSRNSTKTCSSCGALTGPTGLNGLSVRRWVCSACGAVLDRDINAAINTLVGAGAAHEEGLQNVA

SEQ ID NO: 2558 - protein, 350 aa, Unknown
  Description of Unknown: uncultivated organism sequence
  Category: MG81 effectors
  Description: MG81-843 effector
MVQVQLKLKLTPRQERQLNRWLCHLTAVWNWGVKKIENDARDRVFYTPKAFQNLLANHSQKVEIPSHVLQGILADAYLAWSRCFKGIARRPRLKGFRNRLNSIPLIDPVKRWPDRRISIPTLGRIRHHKQEVPEGKVKCGRIVKRASGWYLCLFIDAEPNAIPHVSDSEIGIDPGFKDLLALSSGEKMSHPRELEASALRLAQAQRGVNRKQVARLHERIANQRKDRNHKLSRRLVSENQLIAFSADNHKNIAKKFGKSVASSSHGQLRSMLAYKCRAGGREYIEVPSRNSTKTCSTCGALSGPSGWAGLKVRLWTCAHCGAEHDRDVNAAINTLKVGLGMSLELSARAA

SEQ ID NO: 2559 - protein, 341 aa, Unknown
  Description of Unknown: uncultivated organism sequence
  Category: MG81 effectors
  Description: MG81-844 effector
MIRTYRYRIKDSSAAPQLNKLAQACNFVWNFCNESQEHALRWDQRWPTGFDLNKLTAGCSKELGLHSQTVQAVCEQYETRRKQFKKRKLRWRGKRSPGWVPFKAVGVKVIEDTVRYAGHTFRFWKSRELPGPIKCGSFSQDSRKRWYVNFVIEVPEMEATTGTRHIGIDLGLKTLATCSDGRKIEAPRWYRNQQRRIAEHQRKKRSRQARNLQAKIAHRRKDFLHKESDRLTKECELIVVGDVCSSGLAKTNMAKSVNDASWSTFKHLLEYKAIARKVVYREVSERFSTQTCSGCGAIGGPKGREGLGIREWVCGECGSVHDRDVNAALNILRLGHQSLVL

SEQ ID NO: 2560 - protein, 355 aa, Unknown
  Description of Unknown: uncultivated organism sequence
  Category: MG81 effectors
  Description: MG81-845 effector
MKTLKLRIKDKHCKVLDQLASEVNFVWNYVNDLCFKHLKRKGEFLSAYDIAKYTKGTSKECNLHSQTIQAVTEELVTRRKQFKKAKLRWRVSNKKSAKKSLGWIPFKKVAIKYANGYVQYGKHQFKLWDSYGLTQYSVKTGSFVEDSRGRWYVCLVVDSPQQDKPTAIQAIGIDLGLKDIATCSDGTVISNPKFYRKYEQKLGIAQRAKNKNRVRALHAKIANCRKDHLHKASTMLVKNNALIVVGDLSAQKLVKTKMAKSVLDTGFSALKTMLKYKCENAGVMFEEVNERFTTQTCSSCLRVSNNSPKGRAGLRIRVWKCECGSVNQRDLTSSKNILALGHKRLAVGITVLSGR

SEQ ID NO: 2561 - protein, 367 aa, Unknown
  Description of Unknown: uncultivated organism sequence
  Category: MG81 effectors
  Description: MG81-846 effector
MKTLKLRIRDKHIAKLNRLSGSVNFVWNYVNDLSYKHLQKTGKFFSAYDLNEYTKGSGELLGLHSQTIQAINETHAKSRKQFKKAKLNWRTNNPTSKRKSLGWLPFKQSAIKHIATHQTGKKGLKSTLQLSLAKGQKLVIDLWDSYNLSLYQINTCELVQDSRNRWYACITVKEYPKTTCGTGSVGIDLGLKDSATASNGDKLQIKQTLKYAKALAIAQRAKNKQRVKAIHAKIKNTRQDLIHKFTTQLVKDNALIVVGDVKTTQFNSKKGTLAKSVYDAGWFEMRRQLTYKCENAGCRFEIVNEKYTTQTCSCCGDMSSSLSGRAGLRIREWTCAKCGTRHDRDINASRNILAVGLDRLVEGIPER

SEQ ID NO: 2562 - protein, 536 aa, Unknown
  Description of Unknown: uncultivated organism sequence
  Category: MG81 effectors
  Description: MG81-847 effector
MSDEEYKKLLKQYHKLSDRHILVVETDMPYPDVLKVVALSDKIRKAGNELVSLMRKNYDQLMRTKKYRKLLKLYGNTEDKDKRKALADQLNDMQKSYNVTWDLCRTSMIPIGKKYSIDAVFALTKAEDIWRGMEKCLYDNGKTTHFSKYGELPCIRAKQINRGIPMFVEDGKLRFKLRKMQFGIQVNDRFQSDEVNAVLSYLENPDKMDADAVNTLIEEACCIDTYRPCYATLVPRLIRGKYRVYLHLTIEGKAKPKYDRSGNPRHKYGKGMIGADIGTQTVAYTSDTEVGLKNLSERGNSIQTSERKERLYYRAMDRSRRATNPQNYNPDGTIKKGKKTWKYSDRYKKLKAKHAELCRINAVNKQIAINEDANYLRSLGDTFVTEPKNASKLMKRAKKTTVNSKGRFNKKKRFGKSIKNRCPPGFQTTVEKKFKVTGGAYIEVPNNYRASQYDHTADDYIKKKLSDRLYRLRDGTLVQRDWYSSFLLYCYDYRTQDIDKDKCITDFGRCYDKEKALIAWIKANHIKILNSGIKVA

SEQ ID NO: 2563 - protein, 536 aa, Unknown
  Description of Unknown: uncultivated organism sequence
  Category: MG81 effectors
  Description: MG81-848 effector
MSDEEYKKLLKQYHKLSDRHILVVETDMPYPDVLKVVALSDKIRKAGNELVRLMRKNYDQLMRTKKYRKLLKLYGNTEDKDKRKALADQLNDMQKSYNVTWDLCRTSMIPIGKKYSIDAVFALTKAEDIWRGMEKCLYDNGKTTHFSKYGELPCIRAKQINRGIPMFVEDGKLRFKLRKMQFGIQVNDRFQSDEVNAVLSYLENPDKMDADAVNTLIEEACCIDTYRPCYATLVPRLIRGKYRVYLHLTIEGKAKPKYDRSGNPRHKYGKGMIGADIGTQTVAYTSDTEVGLKNLSERGNSIQTSERKERLYYRAMDRSRRATNPQNYNPDGTIKKGKKTWKYSNRYKKLKAKHAELCRINAVNRQLAINEDANYLRSLGDTFVTEPKNASKLMKRAKKTTVNSKGKFNKKKRFGKSIKNRCPSGFQTTVEKKFKVTGGAYIEVPNNYRASQYDHTADDYIKKKLSDRLYRLRDGTLVQRDWYSSFLLYCYDYRTQDIDKDKCITDFGRCYDKEKALIAWIKANHIKILNSGIKVA

SEQ ID NO: 2564 - protein, 536 aa, Unknown
  Description of Unknown: uncultivated organism sequence
  Category: MG81 effectors
  Description: MG81-849 effector
MSDEEYKKLLKQYHKLSDRHILVVETDMPYPDVLKVVALSDKIRKAGNELVRLMRKNYDQLMRTKKYRKLLKLYGNTEDKDKRKALANQLNDMQKSYDVTWDFCRTSMIPIGKKYSIDAVFALTKAEDIWRGMEKCLYDNGKTTHFSKYGELPCIRAKQINRGIPMFVEDGKLRFKLRKMQFGIQVNDRFQSDEVNAVLSYLENPDKMDADAVNTLIEEACCIDTYRPCYATLVPRLIRGKYRVYLHLTIEGKAKSKYDRFGNPRHKYGKGMIGADIGTQTVAYTSDTEVGLKNLSERGNSIQTAERKERLYYRAMDRSRRATNPQNYNPDGTIKKGKKTWKYSDRYKKLKAKHTELCRINAVNRQLAINEDANYLRSLGDTFVTEPKNASKLMKRAKKTTVNSKGKFNKKKRFGKSIKNRCPSGFQTTIEKKFKVTGGAYIEVPNNYRASQYDHTADDYIKKKLSDRLYRLRDGTLVQRDWYSSFLLYCYDYRTQDIDKDKCITDFGRCYDKEKALIAWIKANHIKILNSGIKVA

SEQ ID NO: 2565 - protein, 512 aa, Unknown
  Description of Unknown: uncultivated organism sequence
  Category: MG81 effectors
  Description: MG81-850 effector
MPTKQKEDSNRCVLTLPLLTEPWQEHIIEKRFKIIEHLKNQLISIELRKLKNLQRTKAYKNLIKQIESVPKSERTVLYKERNKMLKDAGFSQYTFMDDMAGKKSLMQKHFESHINVQIAHKAAIDVWSSFEKFLFGTGQIVHYQKRGTLSSVASKSPKTGMFYYPDENIFKWSGGGTKPKGGIILCLRVASVKTNYEKEMVANNEIKYYRVVRKWMKTKYKYYLQITFAGKPADKHREISTGRVGIDIGTQTIAIASDKSVKLLELADKVNKNHIKKCELQRKLDRSRRYTNPDNFNPDGTVKRGTKGHKLKWNKSKHYIEIAGKIRELERKNADIRKYQHTCLANDILAMGNQIYIEPMNYKGLQKRVKETQVDEKGRYKKKKRFGKSLANKAPAMFVTILKTKAEQHGGEVYEVDIMSYRASQCDHTTGEYTKHGLNDRWRILGNGDKVQRDLYSAFLIKNSNKTHDEIDLDKCSKTYDNFKKLHDKEIENIRNEVKLRERKNISSYGIA

SEQ ID NO: 2566 - protein, 416 aa, Unknown
  Description of Unknown: uncultivated organism sequence
  Category: MG81 effectors
  Description: MG81-851 effector
MIWLEKKSLMQKHFESHINVQIAHKAAIDVWSSFEKFLFGTGQIVHYQKRGTLSSVASKSPKTGMFYYSDENIFKWSGGGTKPKGGIILCLRVASVKTNYEKEMVANNEIKYYRVVRKWMKTKYKYYLQITFAGKPADKHREISTGRVGIDIGTQTIAIASDKSVKLLELADKVNKNHIKKCELQRKLDRSRRYTNPDNFNPDGTVKRGTKGHKLKWNKSKHYIEIAGKIRELERKNADIRKYQHTCLANDILAMGNQIYIEPMDYKGLQKRAKETQVDEKGRYKKKKRFGKSLANKAPAMFVTILKTKVEQHGGEVYEVDIMSYRASQCDHTTGEYTKHGLNDRWRILGNGDKVQRDLYSAFLIKNSNKTHDEIDLDKCSKTYDSFKKLHDTEIENIRNEVMLRERKNISSYGIA

SEQ ID NO: 2567 - protein, 512 aa, Unknown
  Description of Unknown: uncultivated organism sequence
  Category: MG81 effectors
  Description: MG81-853 effector
MPTKQKEGGNRCVLTLPLLTEPWKEHIIEKRFKIIEHLKNQLISIELRKLKNLQRTKAYKNLIKQIESVPKSERTVLYKERNKMLKDAGFSQYTFMDDMAGKKSLMQKHFESHINVQIAHKAAIDVWSSFEKFLFGTGQIVHYQKRGTLSSVASKSPKTGMFYYSDENIFKWSGGGTKPKGGIILCLRVASVKTNYEKEMVANNEIKYYRVVRKWMKTKYKYYLQITFAGKPADKHREISTDRVGIDIGTQTIAIASDKSVKLLELADKVNKNHIKKCELQRKLDRSRRYTNPDNFNPDGTVKRGTKGHKLKWNKSKHYLEIAGKIRELERKNADIRKYQHTCLANDILAMGNQIYIEPMNYKGLQKRAKETQVDEKGRYKKKKRFGKSLANKAPAMFVTILKTKAEQHGGEVYEVDIMSYRASQCDHTTGEYTKHGLNDRWRILGNGDKVQRDLYSAFLIKNSNKTHDEIDLDKCSKTYDNFKKLHDKEIENIRNEVILRKRRNISSYGIA

SEQ ID NO: 2568 - protein, 512 aa, Unknown
  Description of Unknown: uncultivated organism sequence
  Category: MG81 effectors
  Description: MG81-854 effector
MPTKQKEGGNRCVLTLPLLTEPWQEHIIEKRFKIIEHLKNQLISIELRKLKNLQRTKAYKNLMKRIEFVPKSERTALYKERNKMLKDAGFSQYTFMDDMAGKKSLMQKHFESHINVQIAHKAAIDVWSSFEKFLFGTGQIVHYQKRGTLSSVASKSPKTGMFYYSDENIFKWSGGGTKPKGGIILCLRVASVKTNYEKEMVANNEIKYYRVVRKWMKTKYKYYLQITFAGKPADKHREISTGRVGIDIGTQTIAIASDKSVKLLELADKVNKNHIKKCELQRKLDRSRRYTNPDNFNPDGTVKRGTKGHKLKWNKSKHYIEIAGKICELERKNADIRKYQHTCLANDILAMGNQIYIEPMNYKGLQKRVKETQVDEKGRYKKKKRFGKSLANKAPAMFVTILKTKAEQHGGEVYEVDIMSYRASQCDHTTGEYTKHGLNDRWRILGNGDKVQRDLYSAFLIKNSNKTHDEIDLDKCSKTYDSFKKLHDKEIENIRNEVKLRERKNISSYGIA

SEQ ID NO: 2569 - protein, 469 aa, Unknown
  Description of Unknown: uncultivated organism sequence
  Category: MG81 effectors
  Description: MG81-855 effector
MPTKQKEGGNRCVLTLPLLTEPWQEHIIEKRFKIIEHLKNQLISIELRKLKKLQRTKAYKNLIKQIESVPKSERTVLYKERNKMLKDAGFSQYTFMDDMAGKKSLMQKHFESHINVQIAHKAAIDVWSSFEKFLFGTGQIVHYQKRGTLSSVASKSPKTGMFYYSDENIFKWSGGGTKPKGGIILCLRVASVKTNYEKEMVANNEIKYYRVVRKWMKTKYKYYLQITFAGKPADKHREISTGRVGIDIGTQTIAIASDKSVKLLELADKVNKNHIKKCELQRKLDRSRRYTNPDNFNPDGTVKRGTKGHKLKWNKSKHYLEVAGKIRELERKNADIRKYQHTCLANDILAMGNQIYIEPMNYKGLQKRAKETQVDEKGRYKKKKRFGKSLANKAPAMFVTILKTKAEQHGGEVYEVDIMSYRASQCDHTTGEYTKHGLNDRWRILGNGDKVQRDLYSAFLIKNSNKTHD

SEQ ID NO: 2570 - protein, 537 aa, Unknown
  Description of Unknown: uncultivated organism sequence
  Category: MG81 effectors
  Description: MG81-856 effector
MISDEEYKKLLKQFHKLSDRHILVVETDMPYSDVLKVVILSDKIRKAGNELVSFMRKNYDQLIRTKKYRKLLKLYGSTKDKKKRKDLADQLNEMQKAYNVTWDYCRKSMIPIGKKYGIDAVFALTKAEDVWRGIEKCLYGNGKAIHFSKYGELPCIRAKQINRGISISVKDDRLQFKLGKTAFGIQVNDRFQQDEVDAVLTYLAEPEIVDNKAVNTLIEDAYYIDTYRPCYATLVIKMIRGKYRVYLHLTIEGKTKLKYDKHGNPRHKYGKGVIGADIGTQTVAYTSDTEVGLKNLSERGNSIQTSERKERLLYRAMDRSRRAANPQNYNEDGTVKKGRKTWKYSNHYKKLKAKHSELCRINAVNRQLAINEDANHLRSLGDTFVTEPKNASKLMKRAKETAVNDKGRFNKKKRFGKSIKNRCPSGFQTTVEKKFKTTGGTYIEVPNNYRASQYDHTVDDYIKKKLSDRLYKLQDGTEVQRDWYSSFLLYCYDYKIQNIDKNKCITKFDNCYKKEKALITWIKAHKIKVLNSGIKIA

SEQ ID NO: 2571 - protein, 364 aa, Unknown
  Description of Unknown: uncultivated organism sequence
  Category: MG81 effectors
  Description: MG81-857 effector
MVKTFSFRIKDSTSHKYLHAMARAVNYVWNYCNDIQKKAARSNRRWVNWVMLNNLTSGCSKELRLHSQTIQAIGECYATSLKEAKSPTGKKKRFLRFRGRRSQGWIPFKASGIKLRGDSAVYQGRRFKFWKTRDIPPTIKNGNFSCDSRGRWYLNLVCEYEETIVSNEGNVGIDLGLKSLATLSTGKKYDAQKFFRKYERKLAHHQRCNNSRQVQTIHAKIANSRKDFNHKVSHELTRDFNKIFVGDVGSLGLLKTKLAKSVSDASWGQLRTFIEYKAIARGGTYYVVDENNTTRTCSACGCLTGPSGLAGLRVREWQCKECGTVHDRDTNSAINIEQRGLLTLPSPLRTLSAKDSESLGIPRL

SEQ ID NO: 2572 - protein, 1268 aa, Unknown
  Description of Unknown: uncultivated organism sequence
  Category: MG81 effectors
  Description: MG81-858 effector
MKVSKVNHRRAAVAVNKKSVTVNGILYDAPVKKNVKTGNMSAYVSSKYVIDNVVKNSSRLYSPFSSKRIVIDREKIRIADRLKQCYDNFVKYYLSNGSLNEQQMRFNPNNTYMADSRVHFCVPSGIDIESLINSIVDCSLRKSLKRTYRFETNYGEKNTFNLPDLVKKSIKIYCTDEKRKLNDREEQEMYVLFSYMYEDKYKDRQKVLIANSISNQATKVKVCDDESRLIKLSIADTKKKPLWDFIVDYANSDKNGQYTILRNIRKSIVLFVCGVDVYRNIENNDNLDIWKWEEYGIQESQLFVKIENCYTTKGEDIALNEIRNVNLDHYMKAIGVLDDERSKFWFQHYENTIEALFSKKSKRKIERIKTAYLCEYLWKNFCSYVALKYVDLGKGVYHFTMSDKLSLMNKNTNENGIKFGEVDSRFNKGISSFDYERIKAEETIDRNISTYTTFATNIFAKSVIKDSYRQKKAGNSDALQYDDETYYNRKAMNPYALKRVLRYWGGQSRWKSELEELNVAELCIDIKNRLSKIRNSGVHYTSTSALKGNDDDSIVGMLIKKDFDDIKDVYASKYYSNNVWMFYNTDKISKMMEYLYQDDSNIRDAQIPAFNSVIKRKDMAEVIEKIIKKNSYKTIKEPYQREKYRSCLYFMLKEIYYNRFIKQDNLKDQVIQIIDSNTELIGDNSRAVDNLKKRIHDVDSQTMSFGELCQVIMTDYNMQNQENKSIKSKERQDKDRKNGIDNSYKHFPLLLHHLIKVSFLKFIKTDEKLAFIREPRITELDKTLEQFEAQIQTVDIYNSLKMMVAENKSLLDWYTLAHFLMPKQLNHLIGDVKNYIQYLSNIDKRAGSVKNNKSASTEVKIRQYSEIVRILDFSLQYIGRVSNDVTDYFVDEDEYAAFLSKYVEFSGNDIVSMKAFCQSRTANGKHTIGLYCDGANPIMNRNIAYAKMYGNDEILSYIYNKVTKKDIEKYYVSQDNLEKVFADGKCQDVQQQNALCDFQKMKNHIELTEVSIYTDILNDFMAQFISWAYLRERDLMYFQLGLNYIRMFYGTYELEEKYYKLHGENINIEKGALLYQIVAMYSHELPIYKVDESGIAILAEKQGSSGASIKSFVTEYCKEEMKKAYTYENGLELFEDVNQHDDLSKLRNDFAHMRYMSARDKSIMDIVSEIYNGFFIYDTKLKKSVSFIFKNILMRYAVDVNIEFCHKGDNEDTNNLIRIKDEVGLYSDKYTYKVEDNDTVDIEVRNSEFLEQLKKLLEYKKESEGSEL

SEQ ID NO: 2573 - protein, 1268 aa, Unknown
  Description of Unknown: uncultivated organism sequence
  Category: MG81 effectors
  Description: MG81-859 effector
MKVSKVNHRRAAVAVNKKSVTVNGILYDAPVKKNVKTGNMSAYVSSKYVIDNVVKNSSRLYSPFSSKRIVIDREKIRIADRLKQCYDNFVKYYLSNGSLNEQQMRFNPNNTYMADSRVHFCVPSGIDIESLINSIVDSSLRKSLKRTYRFETNYGEKNTFNLPDLVKKSIKIYCTDEKRKLNDREEQEMYVLFSYMYEDKYKDRQKVLIANSISNQATKVKVCDDESRLIKLSIADTKKKPLWDFIVDYANSDKNGQYTILRNIRKSIVLFVCGVDVYRNIENNDNLDIWKWEEYGIQESQLFVKIENCYTTKGEDIALNEIRNVNLDHYMKAIGVLDDERSKFWFQHYENTIEALFSKKSKRKIERIKTAYLCEYLWKNFCSYVALKYVDLGKGVYHFTMSDKLSLMNKNTNENGIKFGEVDSRFNKGISSFDYERIKAEETIDRNISTYTTFATNIFAKSVIKDSYRQKKAGNSDALQYDDETYYNRKAMNPYALKRVLRYWGGQSRWKSELEELNVAELCIDIKNRLSKIRNSGVHYTSTSALKGNDDDSIVGMLIKKDFDDIKDVYASKYYSNNVWMFYNTDKISKMMEYLYQDDSNIRDAQIPAFNSVIKRKDMAEVIEKIIKKNSYKTIKEPYQREKYRSCLYFMLKEIYYNRFIKQDNLKDQVIQIIDSNTELIGDNSRAVDNLKKRIHDVDSQTMSFGELCQVIMTDYNMQNQENKSIKSKERQDKDRKNGIDNSYKHFPLLLHHLIKVSFLKFIKTDEKLAFIREPRITELDKTLEQFEAQIQTVDIYNSLKMMVAENKSLLDWYTLAHFLMPKQLNHLIGDVKNYIQYLSNIDKRAGSVKNNKSASTEVKIRQYSEIVRILDFSLQYIGRVSNDVTDYFVDEDEYAAFLSKYVEFSGNDIVSMKAFCQSRTANGKHTIGLYCDGANPIMNRNIAYAKMYGNDEILSYIYNKVTKKDIEKYYVSQDNLEKVFADGKCQDVQQQNALCDFQKMKNHIELTEVSIYTDILNDFMAQFISWAYLRERDLMYFQLGLNYIRMFYGTYELEEKYYKLHGENINIEKGALLYQIVAMYSHELPIYKVDESGIAILAEKQGSSGASIKSFVTEYCKEEMKKAYTYENGLELFEDVNQHDDLSKLRNDFAHMRYMSARDKSIMDIVSEIYNGFFIYDTKLKKSVSFIFKNILMRYAVDVNIEFCHKGDNEDTNNLIRIKDEVGLYSDKYTYKVEDNDTVDIEVRNSEFLEQLKKLLEYKKESEGSEL

SEQ ID NO: 2574 - protein, 1073 aa, Unknown
  Description of Unknown: uncultivated organism sequence
  Category: MG81 effectors
  Description: MG81-860 effector
MQVRDDVILGLDIGVGSLGWALLEEDLQTGEQRLLQRQTPQGETTYALGVRLFHVPENAKTKELLNVKRRTARMQRRTTARRAQRMRRVRALLDSLGVPGVRDADAFHLGKGRGAQCDPWQLRREGLERRLEAREWAVVLLHIAKHRGFRSNSKTDRSGSDKEMGQVLQAVSNLQQEVEASGLTVGALLASRERRRNRADHTGAPRYDLCMLRSLQENEVDILFTRQRELDNPLAGEEVRCRYAELAFAQRPLAPVSHMVGPCAFLEGERRAPRFAPTAELFRYVQALCNMRLRQETGEETPLSEEQRQAACTVFGSVQSVTYKKLRQVLRLPAGCRFAGLSYGVTEKGNVQDPEKADVVMRTGKCCQGTACLRGILGDAYEALHEQRLDEADAARLAATGALSAPAAALLARGMAGLRLTDAVARIVSELNDLDQIRAVLALLPLAAPRIAALSQAAGEGKLGIFQGTARLSLRAMEAILPHMLACGEYAAACELAGFDPRAAQKTDVTDIRNPVVLRVFREVRRQFSAICREFGFLPGRVHVELLREVGKSGEERNRISRGLERRTKEKEAARKAVAQLLGKSPETVSAGEVQRYELWRQQDGKCAYYMLWRHAGGERAYGDAMPQGSIPPDWLADGVNAVQVDHILPRSRTFDNSFHNLCLCCHAANQAKGGRTPWEWLGAAQPQAWHDFEQWVQSLPLKGLKKRNYLLRDLNAEVQGRFHARNLTDSGYVARLTLRWLEEEYARHDVPMQDADGRTRRRFFARPGQVTDFLRRHWGVQALKKIDGQRSGDRHHALDALLVAACSEGMLQRMVRAFQREENGPERLHIPCPWQDFSATVGRALGSVFVSRVERGRTKGPLHEETLRAIREERQPDGETRRVLYERKAVARLTAADLDKIKDAARCPDVVAALRRWLDAGKPGDALPRSAHGDIIRHVRVCAGEFSSGVVLQRGSGQAQASNGGMVRTDIYSRDGKFYMVPVYAKDVADKRLPLRACVAAKAEKDWREMTADYRFLFSLTPDCYVLTENRKGEVKEGYFAGANRNTSAISLSLAHDKQNVIQHRHHHVKAF

SEQ ID NO: 2575 - protein, 1098 aa, Unknown
  Description of Unknown: uncultivated organism sequence
  Category: MG81 effectors
  Description: MG81-861 effector
MQVHDDVILGLDIGVGSLGWALLEEDLQTGEQRLLQRQTPQGETTYALGVRLFHVPENAKTKELLNVKRRTARMQRRTTARRAQRMRRVRALLDSLGVPGVRDADAFHLGKGRGAQCDPWQLRREGLERRLEAREWAVVLLHIAKHRGFRSNSKTDRSGSDKEMGQVLQAVSNLQQEVEASGLTVGALLASRERRRNRADHTGAPRYDLCMLRSLQENEVDILFTRQRELGNPLAGEEVRCRYAELAFAQRPLAPVSHMVGPCAFLEGERRAPRFAPTAELFRYVQALCNMRLRQETGEETPLSEEQRQAACAVFGSVQSVTYKKLRQVLRLPAGCRFAGLSYGVTEKGNVQDPEKADVVMRTGKCCQGTACLRGILGDAYEALHEQRLDEADAARLAATGALSAPAAALLARGMAGLRLTDAVARIVSELNDLDQIRAVLALLPLAAPQIAALSQAAGEGKLGIFQGTARLSLRAMEAILPHMLACGEYAAACELAGFDPRAAQKTDVTDIRNPVVLRVFREVRRQFSAICREFGFLPGRVHVELLREVGKSGEERNRISRGLERRTKEKEAARKAVAQLLGKSPETVSAGEVQRYELWRQQDGKCAYYMLWRHAGGERAYGDAMPQGSIPPDWLADGVNAVQVDHILPRSRTFDNSFHNLCLCCHAANQAKGGRTPWEWLGAAQPQAWHDFEQWVQSLPLKGLKKRNYLLRDLNAEVQGRFHARNLTDSGYVARLTLRWLEEEYARHDVPMQDADGRTRRRFFARPGQVTDFLRRHWGVQALKKIDGQRSGDRHHALDALLVAACSEGMLQRMVRAFQREENGPERLHIPCPWQDFSATVGRALGSVFVSRVERGRTKGPLHEETLRAIREERQPDGETRRVLYERKAVARLTAADLDKIKDAARCPDVVAALRRWLDAGKPGDALPRSAHGDIIRHVRVCAGEFSSGVVLQRGSGQAQASNGGMVRTDIYSRDGKFYMVPVYAKDVADKRLPLRACVAAKAEKDWREMTADYRFLFSLTPDCYVLTENRKGEVKEGYFAGANRNTSAISLSLAHDKQNVIQGIGITTLKRFEKYRVDRFGRLSLVRREADPRGRS

SEQ ID NO: 2576 - protein, 1098 aa, Unknown
  Description of Unknown: uncultivated organism sequence
  Category: MG81 effectors
  Description: MG81-862 effector
MQVRDDVILGLDIGVGSLGWALLEEDLQTGEQRLLQRQTSQGETTYALGVRLFHVPENAKTKELLNVKRRTARMQRRTTARRAQRMRRVRALLDSLGVPGVRDADAFHLGKGRGAQCDPWQLRREGLERRLEAREWAVVLLHIAKHRGFRSNSKTDRSGSDKEMGQVLQAVSNLQQEVEASGLTVGALLASRERRRNRADHTGAPRYDLCMLRSLQENEVDILFTRQRELGNPLAGEEVRCRYAELAFAQRPLAPVSHMVGPCAFLEGERRAPRFAPTAELFRYVQALCNMRLRQETGEETPLSEEQRQAACTVFGSVQSVTYKKLRQVLRLPAGCRFAGLSYGVTEKGNVQDPEKADVVMRTGKCCQGTACLRGILGDAYEALHEQRLDEADAARLAATGALSAPAAALLARGMAGLRLTDAVARIVSELNDLDQIRAVLALLPLAAPRIAALSQAAGEGKLGIFQGTARLSLRAMEAILPHMLACGEYAAACELAGFDPRAAQKTDVTDIRNPVVLRVFREVRRQFSAICREFGFLPGRVHVELLREVGKSGEERNRISRGLERRTKEKEAARKAVAQLLGKSPEAVSAGEVQRYELWRQQDGKCAYYMLWRHAGGERAYGNAMPQGSIPPAWLADGVNAVQVDHILPRSRTFDNSFHNLCLCCHAANQAKGGRTPWEWLGAAQPQAWHDFEQWVQSLPLKGLKKRNYLLRDLSAEVQGRFHARNLTDSSYVARLTLRWLEEEYARHDVPMQDAEGRTRRRFFARPGQVTDFLRRHWGVQALKKIDGQRSGDRHHALDALLVAACSEGMLQRMVRAFQREENGPERLHIPCPWQDFSTTVGRALGSVFVSRVERGRTKGPLHEETLRAIREERQPDGETRRVLYERKAVARLTAADLDRIKDAARCPDVVAALRRWLDAGKPGDDLPRSAHGDIIRHVRVRAGEFSSGVILQRGSGQAQAKNGGIVRTDIYSRDGKFYMVPVYAKDVADKRLPLRACVAHKDEKDWLELTEDYHFLFSLTPDCYVLTENRKGEVKEGYFEGPDRGSANISLSLAHDKKNTIRGIGIQNLKRFEKYRVDRFGRLSLVRREADPRGRS

SEQ ID NO: 2577 - protein, 1134 aa, Unknown
  Description of Unknown: uncultivated organism sequence
  Category: MG81 effectors
  Description: MG81-863 effector
MKYVIGMDIGIGSIGWSVIRSDADCKRIEDFGVRIFDPGENASDRKSNSQIRHEYRSVRRVLRRRKHRKELLKAHLENIGLTTIDRINEYFKHADGDIISLRVKGLDKKLAPEEIAACLINIANRRGYRPFYEKEELSQYEKTSLNKTRQFMLSGEYRTSAEMILKNEQFDSEESEYRSYRNRSGNEETVLIERKWLRDEVEKILKKQSEFYPCLNDRNTNAIKRIIFDQRDFEDGPGDKNDPFRRYTGFLESMGQCRFYPDEKRGYRATLTADTYSLVNELSQYSYVDENGCFVFDSALAHDLIESALKNAKFTKSDFNKICKAHGIVPIYGGKGKDTDISRCFKFLKAIKPILEADGFDWETVCNIDTASDPDSILNRIGIIVSENITPARRKKALKNLNILNDDSITALCNYKFGGTSSVSYKYMSGAIEAFLKGDIYGKHQASHIEETATESVKHTKLPVFDKDFEFFKNPVVFRAINESRKVINAIIEKYGSPSAINIEVGSEVSRSFANRTADKNEQTKRMKEKDAAKKAIAELLGVDIASVTSKMIDRYFLGELQGWKCLYSGKEINKEECLRGSKAYEIDHIVPFSLILDNTLNNKALVLTNENQLKKQQTPLMYLSGERRKKFIGTVNELFRAKKIKKKKYAYLLQPDLNDEKMSEWKSRNLNDMRYISRFMVGYLKENLKFDNSSKSEGRWQNVYAVKGSLTSMFRKLWLNETTWGRADKASIKAETYLDHAVDAVVIGNCLPVYVEIAQVNLRLRDIYKSNGRQFVAEYWDCFNKGVEMISRYYNIDKDTVRAFLKKSDRIPSLIPDLREEVDRRFVDHAIYSKYQKEIADHEGKDFEKPTYEEAEQAYRTSMENLYPTDLQFAHSLSMPLISCKPERKFSGKITADNPVKLREIDGKLYTLSKKEIGKIERKDIEKIYTSDTQLIAYLIELFDGAKDTATLGDIMKEKGISEIRTKNGNAIRKLTLRNICNKDFLKKEIDENNYTYLDTAKYYCVELYKDIKNQLQVQGIKRADIILQNGKLCLAPWYKQPDDYFKHVMYLQKNDYLKVYKNGKLSFCGYYRSAAGLTNSRLYFIIDNQPEDKKKYITLKLEVKKYSVDILGKIGKKEIKCGEPLSSAKVKK

SEQ ID NO: 2578 - protein, 1323 aa, Unknown
  Description of Unknown: uncultivated organism sequence
  Category: MG81 effectors
  Description: MG81-864 effector
MKVSKVDHTSAGVTSKKDITYNGLLYRNPPKKGVNEILKDAETDEKILENMENYITRLNNRASSLYSVFNPIGNEKSQAKNPEQKDLYQNISSYFTEFVRDIKNNSADTASRNLLNRSFTVNSDKETIDNFVARYLRKSLQKRVNGYELSEIIRNIIYLKANLYRKEDVPVKEVCILAEAIKEDITKERQIKKMAASIVKQDVKIQTYLSDDGKVLLRHTFAKHSKKSALFRFLQRFTSVDIEEQEEMIRELRALVVLFYCGPNAYKEAQGDGIGVWTFGKTASDVRVNFCEEACRLITEYQAELERVETEKKEKSSNVKPVNTDIYKEKIKKAIRYSIAGSYQEAARTLKETEGFEDKRLWLGLIEEYAERILLSNRRFMDPGTQNCEFLCKRTMQMLISYIAMKLVDLGKAVYHFAMPAQIDVTNGKSAEFGEVQPSFRDGITSFDYEWIKAEESLTRELSTYSVFAVRNFLNSISKKESDIIAVNLNDVESGNLKSNSVMRVLRYFGGKKEWQDTYIGEVSENELINALRKEIGAARNSTFHYAGTIDNGITDDDKLIISQIYEKEHGDIGRIRRKKYYSNNALMFYKKTDIDALMDYLYSAPKDHPAQIPAFNKILNKNKVYEFSKFIKGNPKKKISTAGKTEELKGCVFYMLKECYYYGFLPDSRSAQFVKEALEDIVKSAEDADPAATDRRLEAAQNFKKRFYEISEKASLGQICQRIMTDFQLQNGGQKKGQSSKYAKKGVGEPIYQHFRMMLYDILRKAFWKYLNTLTETGEMNFMFMREPSYKPEFAAEEEFCKDWNDHSYDDIREGMEEDSYLEAWFTAAHFIAPAQLNHLIGSFKKYEQFTSDIKYRAEGNGIDCNSRWQSRIQEDEMHRLLRVLEFVQMTSGTFSKEISDYYGRDEDSAIEEYAEFVENFVEFSTKKMPNKHVALQTFCNTAVKSGSPNGKIGIYYDGEKPILNRNIVMADMYGNVSLISNCMKKVTEREIKVFYNDMNNLTEVFKRGVCQNEDEQKRLKAFQNNKNRVELLDVAIYTEIVNELYAQLVSWSYLRERDLMYYQLGVNYMKLFNGNSVPKDSFLRIIQGNGANITEGAVLYQLVAMNSFGWPLLCRDGSADKKANTTGQKVASFFMDYCRKDASIYESCLMLFERLQSHDAIIKEIRNPIDHMHYFEKGKNGATKSILEMYGDIYDRFFDYDLKLKKSVSFVLQNILLDHFIIAHTVMNRQEGKYKYKNKDGQEKSYTGTKLAIRPNREQKKKVFDKTIRKMKEISIIHYGMESDILTYKIKKDGKPVLVKADARSRMFLDQMQRILEYSKT

SEQ ID NO: 2579 - protein, 1034 aa, Unknown
  Description of Unknown: uncultivated organism sequence
  Category: MG81 effectors
  Description: MG81-865 effector
MARVLGLDIGIGSCGWAVVETPEIDEATGKVQGEAAIVACGTRCFDVPEEPKTKELKNKTRRLLRGQRRVLRRRRQRIAQIRRLLATHGLPADPGPLPAGAPGDLVWRLRAQGLDRRLEPAEWARVLIHIANHRGFKSNSKRDRGNKSESGKMLKAIAATGQKLADWRSFGEMLARDPDFAARKRNRTGEYALTPLRADLEREVARLFEAQRRLANPASSPALEAAYRELAFAQRPVAAREPPVGRCAFLEGEKRAPRHAPSFERFRFLAKLATVKVIPMGERPRFLTDEERPRAIGLLGRQELVTYKALRNALELPPSTVFADLPQRKADPESAPFARFDGTLALREGLGKRRFTELLRSAPEKLDAAMEALVWLDDLDQIRARLAASGLDPADVAALTGDEALARFAGFKGAGHISTAACRALIPHLEHGRGYAEACAALGWDHAKAGVPRIEEVANPVVRKILRECTRQIAVVLAEHGPVDAVHLEMARDVGKSAEERNEIRKGMDERAAQRDRHREEFRKLLGHAPNDEELLRYELWKEQNHRCPYTFPDEAAYIPPECLLATDNRVQVDHILPYSRSGDDSFRNKVLCYVRANQEKRRRTPYEWLGDDPQRWRLFEARIAGLADMHHQKRRKLLMRTFADREQAYRARHLQDTRYAMRVLRFALEAQFPTDARRRLFPRPGAITALLRRAWGLDELKKGGALGDRDHALDAIVVAFTTESLLNRLTRLHQELEEIGSGRATPLVETPLGSSPQARERFRQMVKAAAEGVFVSRPETRRGRGPAHDATLYGFERTPEGQEIQYERKNVWELKAADLDRLKGDPARHRVLREVLGAWLQRAEERRVKPEKLWREEPPRLPNGPPVRSVVLVRAKTTAGVKLQRGNALAHADQASMVRVDVFTKGGKFFLVPIYAWQVAKLETPPFLAIKSLADEDGWYPIDDTYAFLWSLYPGSFIKAVNRKGERFEGYFRSLDRSNGRISFSPPGNGDSKAQERFTTKTLQVFEKYHVDRLGRLHRIEREPRLWHGAVCS

SEQ ID NO: 2580 - protein, 1098 aa, Unknown
  Description of Unknown: uncultivated organism sequence
  Category: MG81 effectors
  Description: MG81-866 effector
MQVRDDVILGLDIGVGSLGWALLEEDLQTGEQRLLQRQAPQGETSYALGVRLFNVPENAKTKELLNVKRRTARMQRRTTARRAQRMRRVRALLDSLGVLGVRDADAFHLGKGRGAQCDPWQLRREGLERRLEAREWAVVLLHIAKHRGFRSNSKTDSSGSDKEMGQVLQAVSNLQQEVEASGLTVGALLASRERRRNRADHTGAPRYDLCMLRSLQEDEVNILFTRQRELGNPLAGEDIRCRYAELAFAQRPLAPVSHMVGPCAFLEGERRAPRFAPTAELFRYVQALCTMRLRQETGEETPLSEEQRQAACAVFGSVQSVTYKKLRQVLRLPAGCRFVGLSYGVTEKGKVQDPEKADVVMRTGKCCQGTACLRGILGDAYDALHEQRLDEADAARLAATDALSAPAAALLARGMAGLRLTDALVRIVSELNDLGQIRAILALLPLPAPRIAALSQAAGEGKLGFFQGTARLSLRAMEAILPHMQACGEYAAACELAGFDPRAAQKTDVTDIRNPVVLRVFREVRRQFSAICREFGFLPGRVHVELLREVGKSGEERNRISRGLERRTKEKEAARKAVAQLLGKSPEAVSAGEVQRYELWRQQDGKCAYYMLWRHAGGERAYGNAMPQGSIPPAWLADGVNAVQVDHILPRSRTFDNSFHNLCLCCHAANQAKGGRTPWEWLGAAQPQAWHDFEQWVQSLPLKGLKKRNYLLRDLSAEVQGRFHARNLTDSSYVARLTLRWLEEEYARHDVPMQDAEGRTRRRFFARPGQVTDFLRRHWGVQALKKIDGQRSGDRHHALDALLVAACSEGMLQRMVRAFQREENGPERLHIPCPWQDFSATVGRALGSVFVSRVERGRTKGPLHEETLRAIREERQPDGETRRVLYERKAVARLTAADLDRIKDAARCPDVVAALRRWLDAGKPGDALPRSAHGDIIRHVRVCAGEFSSGVVLQRGSGQAQASNGGMVRTDIYSRDGKFYMVPVYAKDVADRRLPLRACVAAKAEKDWREMTADYRFLFSLTPDCYVLTENRKGEVKEGYFIGSDRSTAAISLSLAHDRQQSLRGIGITTLKRFEKYRVDRFGRLSPVRREADPRGRS

SEQ ID NO: 2581 - protein, 313 aa, Unknown
  Description of Unknown: uncultivated organism sequence
  Category: MG81 effectors
  Description: MG81-867 effector
MVANNEIKYYRVVRKWMKTKYKYYLQITFAGKPADKHREISTGRVGIDIGTQTIAIASDKSVKLLELADKVNKNHIKKCELQRKLDRSRRYTNPDNFNPDGTVRRGTKGHKLKWNKSKHYLEIAGKIRELERKNSDIRKYQHTCLANDILAMGNQIYIEPMNYKGLQKRAKETQVDEKGRYKKKKRFGKSLANKAPAMFVTILKTKAEQHGGEVYEVDIMSYRASQCDHTTGEYTKHGLNDRWRILGNGDKVQRDLYSAFLIKNSNKTHDEIDLDKCSKTYDSFKKLHDTEIENIRNEVMLRERKNISSYGIA

SEQ ID NO: 2582 - protein, 500 aa, Unknown
  Description of Unknown: uncultivated organism sequence
  Category: MG81 effectors
  Description: MG81-868 effector
MLTLPLLTEPWQEHIIEKRFKIIEHLKNQLISIELKKLKNLQRTKAYKNLIKQIESVPKSERTALYKERNKMLKDAGFSQYTFMDDMAGKKSLMQKHFESHINVQIAHKAAIDVWSSFEKFLFGTGQMIHYQKRGTLSSVASKSPKTGMFYYSDENIFKWSGGGTKPKGGIILCLRVASVKTNYEKEMVANNEIKYYRVVRKWMKTKYKYYLQITFAGKPADKHREISTGRVGIDIGTQTIAIASDKSVKLLELADKVNKNHIKKCELQRKLDRSRRYTNPDNFNPDGTVKRGTKGHKLKWNKSKHYLEIAGKIRELERKNADIRKYQHTCLANDILAMGNQIYIEPMNYKGLQKRAKETQVDEKGRYKKKKRFGKSLANKAPAMFVTILKTKVEQHGGEVYEVDIMSYRASQCDHTTGEYTKHGLNDRWRILGNGDKVQRDLYSAFLIKNSNKTHDEIDLDKCSKTYDSFKKLHDKEIENIRNEVKLRERRNISSYGIA

SEQ ID NO: 2583 - protein, 192 aa, Unknown
  Description of Unknown: uncultivated organism sequence
  Category: MG81 effectors
  Description: MG81-869 effector
MCLEYLILYPDSNEHIRKYQHTCLANDILAMGNQIYIEPMNYKGLQKRAKETQVDEKGRYKKKKRFGKSLANKAPAMFVTILKTKAEQHGGEVYEVDIMSYRASQCDHTTGEYTKHGLNDRWRILGNGDKVQRDLYSAFLIKNSNKTHDEIDLDKCSKTYDSFKKLHDKEIENIRNEVILRKRRNISSYGIA

SEQ ID NO: 2584 - protein, 1099 aa, Unknown
  Description of Unknown: uncultivated organism sequence
  Category: MG81 effectors
  Description: MG81-870 effector
MQVRDDVILGLDIGVGSLGWALLEEDLQTGEQRLLQRQTPQGETTYALGVRLFHVPEKNAKTKELLNVKRRTARMQRRTTARRAQRMRRVRALLDSLGVPGVRDADAFHLGKGRGAQCDPWQLRREGLERRLEAREWAVVLLHIAKHRGFRSNSKTDRSGSDKEMGQVLQAVSNLQQEVEASGLTVGALLASRERRRNRADHTGAPRYDLCMLRSLQENEVDILFTRQRELGNPLAGEEVRCRYAELAFAQRPLAPVSHMVGPCAFLEGERRAPRFAPTAELFRYVQALCNMRLRQETGEETPLSEEQRQAACAVFGSVQSVTYKKLRQVLRLPAGCRFAGLSYGVTEKGNVQDPEKADVVMRTGKCCQGTACLRGILGDAYEALHEQRLDEADAARLAATGALSAPAAALLARGMAGLRLTDALVRIVSELNDLGQIRALLALLPLPAPRIAALSQAAGEGKLGFFQGTARLSLRAMEAILPHMLACGEYAAACELAGFDPRAAQKTDVTDIRNPVVLRVFREVRRQFSAICREFGFLPGRVHVELLREVGKSGEERNRISRGLERRTKEKEAARKAVAQLLGKSPETVSAGEVQRYELWRQQDGKCAYYMLWRHAGGERAYGDAMPQGSIPPDWLADGVNAVQVDHILPRSRTFDNSFHNLCLCCHAANQAKGGRTPWEWLGAAQPQAWHDFEQWVQSLPLKGLKKRNYLLRDLNAEVQGRFHARNLTDSGYVARLTLRWLEEEYARHDVPMQDADGRTRRRFFARPGQVTDFLRRHWGVQALKKIDGQRSGDRHHALDALLVAACSEGMLQRMVRAFQREENGPERLHIPCPWQDFSATVGRALGSVFVSRVERGRTKGPLHEETLRAIREERQPDGETRRVLYERKAVARLTAADLDKIKDAARCPDVVAALRRWLDAGKPGDALPRSAHGDIIRHVRVCAGEFSSGVILQRGSGQAQAKNGGIVRTDIYSRDGKFYMVPVYAKDVADKRLPLRACVAHKDEKDWLELTEDYHFLFSLTPDCYVLTENRKGEVKEGYFEGPDRGSANISLSLAHDKKNTIRGIGIQNLKRFEKYRVDRFGRLSLVRREADPRGRS

SEQ ID NO: 2585 - protein, 512 aa, Unknown
  Description of Unknown: uncultivated organism sequence
  Category: MG81 effectors
  Description: MG81-871 effector
MPTKQKEGGNRCVLTLPLLTEPWQEHIIEKRFKIIEHLKNQLISIELRKLKNLQRTKAYKNLIKQIESVPKSERTALYKERNKMLKDAGFSQYTFMDDMAGKKSLMQKHFESHINVQIAHKAAIDVWSAFEKFLFGSGQMIHYQKRGTLSSVASKSPKTGMFYYSDENIFKWSGGGTKPKGGIILCLRVASVKTNYEKEMVANNEIKYYRVVRKWMKTKYKYYLQITFAGKPADKHREISTGRVGIDIGTQTIAIASDKSVKLLELADKVNKNHIKKCELQRKLDRSRRYTNPDNFNPDGTVKRGTKGHKLKWNKSKHYLEVAGKIRELERKNADIRKYQHTCLANDILAMGNQIYIEPMNYKGLQKRAKETQVDEKGRYKKKKRFGKSLANKAPAMFVTILKTKAEQHGGEVYEVDIMSYRASQCDHTTGEYTKHGLNDRWRILGNGDKVQRDLYSAFLIKNSNKTHDEIDLDKCSKTYDSFKKLHDKEIENIRNEVKLRERRNISSYGIA

SEQ ID NO: 2586 - protein, 353 aa, Unknown
  Description of Unknown: uncultivated organism sequence
  Category: MG81 effectors
  Description: MG81-872 effector
MPTKQKEGGNRCVLTLPLLTEPWQEHIIEKRFKIIEHLKNQLISIELRKLKKLQRTKAYKNLIKQIESVPKSERTVLYKERNKMLKDAGFSQYTFMDDMAGKKSLMQKHFESHINVQIAHKAAIDVWSSFEKFLFGTGQIVHYQKRGTLSSVASKSPKTGMFYYSDENIFKWSGGGTKPKGGIILCLRVASVKTNYEKEMVANNEIKYYRVVRKWMKTKYKYYLQITFAGKPADKHREISTGRVGIDIGTQTIAIASDKSVKLLELADKVNKNHIKKCELQRKLDRSRRYTNPDNFNPDGTVKRGTKGHKLKWNKSKHYLEVAGKIRELERKNADKGVTVWVQILLKVNFANP

SEQ ID NO: 2587 - protein, 521 aa, Unknown
  Description of Unknown: uncultivated organism sequence
  Category: MG81 effectors
  Description: MG81-873 effector
MLILGRRMYMPTKQKEDSNRCVLTLPLLTEPWQEHIIEKRFKIIEHLKNQLISIELRKLKNLQRTKAYKNLIKQIESVPKSERTALYKERNKMLKDAGFSQYTFMDDMAGKKSLMQKHFESHINVQIAHKAAIDVWSSFEKFLFGTGQIVHYQKRGTLSSIASKSPKTGMFYYSDENIFKWSGGGTKPKGGIILCLRVASVKTNYEKEMVANNEIKYYRVVRKWMKTKYKYYLQITFAGKPADKHREISTGRVGIDIGTQTIAIASDKSVKLLELADKVNKNHIKKCELQRKLDRSRRYTNPDNFNSDGTVKRGTKGHKLKWNKSKHYIEIAGKIRELERKNADIRKYQHTCLANDILAMGNQIYIEPMNYKGLQKRAKETQVDEKGRYKKKKRFGKSLANKAPAMFVTILKTKAEQHGGEVYEVDIMSYRASQCDHTTGEYTKHGLNDRWRILGNGDKVQRDLYSAFLIKNSNKTHDEIDLDKCSKTYDNFKKLHDKEIENIRNEVKLRERKNISSYGIA

SEQ ID NO: 2588 - protein, 512 aa, Unknown
  Description of Unknown: uncultivated organism sequence
  Category: MG81 effectors
  Description: MG81-874 effector
MPTKQKEGGNRCVLTLPLLTEPWQEHIIEKRFKIIEHLKNQLISIELRKLKKLQRTKAYKNLIKQIESVPKSERTVLYKERNKMLKDAGFSQYTFMDDMAGKKSLMQKHFESHINVQIAHKAAIDVWSSFEKFLFGTGQIVHYQKRGTLSSVASKSPKTGMFYYSDENIFKWSGGGTKPKGGIILCLRVASVKTNYEKEMVANNEIKYYRVVRKWMKTKYKYYLQITFAGKPADKHREISTGRVGIDIGTQTIAIASDKSVKRLELADKVNKNHIKKCELQRKLDRSRRYTNPDNFNPDGTVKRGTKGHKLKWNKSKHYLEVAGKIRELERKNADIRKYQHTCLANDILAMGNQIYIEPMNYKGLQKRAKETQVDEKGRYKKKKRFGKSLANKAPAMFVTILKTKAEQHGGEVYEVDIMSYRASQCDHTTGEYTKHGLNDRWRILGNGDKVQRDLYSAFLIKNSNKTHDEIDLDKCSKTYDSFKKLHDKEIENIRNEVILRKRRNISSYGIA

SEQ ID NO: 2589 - protein, 583 aa, Unknown
  Description of Unknown: uncultivated organism sequence
  Category: MG81 effectors
  Description: MG81-875 effector
MVLRVFREVRRQFSAICREFGFLPGRVHVELLREVGKSGEERNRISRGLERRTKEKEAARKAVAQLLGKSPETVSAGEVQRYELWRQQDGKCAYYMLWRHAGGERAYGDAMPQGSIPPAWLADGVNAVQVDHILPRSRTFDNSFHNLCLCCHAANQAKGGRTPWEWLGAAQPQAWHDFEQWVQSLPLKGLKKRNYLLRDLNAEVQGRFHARNLTDSGYVARLTLRWLEEEYARHDVPMQDADGRTRWRFFARPGQVTDFLRRHWGVQALKKIDGQRSGDRHHALDALLVAACSEGMLQRMVRAFQREENGPERLHIPCPWQDFSATVGRALGSVFVSRVERGRTKGPLHEETLRAIREERQPDGETRRVLYERKAAARLTAADLDKIKDAARCPDVVAALRRWLNAGKPGDALPRSAHGDIIRHVRVCAGEFSSGVVLQRGSGQAQASNGGMVRTDIYSRDGKFYMVPVYAKDVADKRLPLRACVAAKAEKDWREMTADYRFLFSLTPDCYVLTENRKGEVKEGYFAGANRNTSAISLSLAHDKQNVIQGIGITTLKRFEKYRVDRFGRLSLVRREADPRGRS

SEQ ID NO: 2590 - protein, 512 aa, Unknown
  Description of Unknown: uncultivated organism sequence
  Category: MG81 effectors
  Description: MG81-876 effector
MPTKQKEGGNRCVLTLPLLTEPWQEHIIEKRFKIIEHLKNQLISIELRKLKNLQRTKAYKNLIKQIESVPKSERTALYKERNKMLKDAGFSQYTFMDDMAGKKSLMQKHFESHINVQIAHKAAIDVWSSFEKFLFGTGQIVHYQKRGTLSSVASKSPKTGMFYYPDENIFKWSGGGTKPKGGIILCLRVASVKTNYEKEMVANNEIKYYRVVRKWMKTKYKYYLQITFAGKPADKHREISTGRVGIDIGTQTIAIASDKSVKLLELADKVNKNHVKKCELQRKLDRSRRYTNPDNFNPDGTVKRGTKGHKLKWNKSKHYIEIAGKIRELERKNTDIRKYQHTCLANDILAMGNQIYIEPMNYKGLQKRAKETQVDEKGRYKKKKRFGKSLANKAPAMFVTILKTKAEQHGGEVYEVDIMSYRASQCDHTTGEYTKHGLNDRWRILGNGDKVQRDLYSAFLIKNSNKTHDEIDLDKCSKTYDNFKKLHDKEIENIRNEVILRKRRNISSYGIA

SEQ ID NO: 2591 - protein, 540 aa, Unknown
  Description of Unknown: uncultivated organism sequence
  Category: MG81 effectors
  Description: MG81-877 effector
MATTDKKDEENLRAYKFRLDPNQAQTTALYQAVGAARYTYNMLTAYNLEVNRLRDDYWKRRHDEDISDADIKKELNALAKEDKRYKQLNYGAFGTQYLTPEKKRHEQAEHRIENGEDPSVVWNQETERSANPWLHTANQRVLVSGLQNASDAWDNFWASRTGKRAGRLVGTPRFKKKGVSRDSFTVPAPEKMGAYGTAYLRGEPAYKQGRRKITDYRHVRLSYLGTIRTFNSTKPLVKAVVAGAKIRSYTVSRNADRWYVSFLVKFSEPIRRSATKRARAAGSVGVDLGVKYLASLSDSEAPQRFPNLKFVEGLPSLENPRWSEASSRRLHKLQRALARSQKGSNRRSRLVKQIARLHHMTALRRESNLQQLTKKLATGYTLVGFEDLNVSGMTASAKGTVENPGKNVAQKSGLNRVVLDAAFGVFRNQLEYKAVWYGSAFEKVNRYFASSQTCSECGRKAKTKLTLRDRVFDCAYCGNMMDRDLNAAVNICREAQRLFDEKLASEDRESLNGRGSRGALRGAETVEASRPPASHRRGSP

SEQ ID NO: 2592 - protein, 1098 aa, Unknown
  Description of Unknown: uncultivated organism sequence
  Category: MG81 effectors
  Description: MG81-878 effector
MQVHDDVILGLDIGVGSLGWALLEEDLQTGEQRLLQRQTPQGETTYALGVRLFHVPENAKTKELLNVKRRTARMQRRTTARRAQRMRRVRALLDSLGVPGVRDADAFHLGKGRGAQCDPWQLRREGLERRLEAREWAVVLLHIAKHRGFRSNSKTDRSGSDKEMGQVLQAVSNLQQEVEASGLTVGALLASRERRRNRADHTGAPRYDLCMLRSLQENEVDILFTRQRELDNPLAGEEVRCRYAELAFAQRPLAPVSHMVGPCAFLEGERRAPRFAPTAELFRYVQALCNMRLRQETGEETPLSEEQRQAACAVFGSVQSVTYKKLRQVLRLPAGCRFAGLSYGVTEKGNVQDPEKADVVMRTGKCCQGTACLRGILGDAYEALHEQRLDEADAARLAATGALSAPAAALLARGMAGLRLTDAVARIVSELNDLDQIRAVLALLPLAAPRIAALSQAAGEGKLGIFQGSARLSLRAMEAILPHMLACGEYAAACELAGFDPRAAQKTDVTDIRNPVVLRVFREVRRQFSAICREFGFLPGRVHVELLREVGKSGEERNRISRGLERRTKEKEAARKAVAQLLGKSPETVSAGEVQRYELWRQQDGKCAYYMLWRHAGGERAYGDAMPQGSIPPDWLADGVNAVQVDHILPRSRTFDNSFHNLCLCCHAANQAKGGRTPWEWLGAAQPQAWHDFEQWVQSLPLKGLKKRNYLLRDLNAEVQGRFHARNLTDSGYVARLTLRWLEEEYARHDVPMQDADGRTRRRFFARPGQVTDFLRRHWGVQALKKIDGQRSGDRHHALDALLVAACSEGMLQRMVRAFQREENGPERLHIPCPWQDFSATVGRALGSVFVSRVERGRTKGPLHEETLRAIREERQPDGETRRVLYERKAVARLTAADLDKIKDAARCPDVVAALRRWLDAGKPGDALPRSAHGDIIRHVRVCAGEFSSGVVLQRGSGQAQASNGGMVRTDIYSRDGKFYMVPVYAKDVADKRLPLRACVAAKAEKDWREMTADYRFLFSLTPDCYVLTENRKGEVKEGYFAGANRNTSAISLSLAHDKQNVIQGIGITTLKRFEKYRVDRFGRLSLVRREADPRGRS

SEQ ID NO: 2593 - protein, 1268 aa, Unknown
  Description of Unknown: uncultivated organism sequence
  Category: MG81 effectors
  Description: MG81-879 effector
MKVSKVNHRRAAVAVNKKSVTVNGILYDAPVKKNVKTGNMSAYVSSKYVIDNVVKNSSRLYSPFSSKRIVIDREKIRIADRLKQCYVNFVKYYLSNGSLNEQQMRFNPNNTYMADSRVHFCVPSGIDKESLIDSIVDSSLRKSLKRTYRFETNYGEKITFNLPDLVKKSIKIYCTDEKRKLNDREEQEMYVLFSYMYEDKYKDRQKVLIANSISNQATKVKVCDDESSLIKLSIADTKKKPLWDFIVDYANSDKNGQYTILRNIRKSIVLFVCGVDVYRNIENNDNLDIWKWEEYGIQESQLFVKIENCYTTKDEDIALNEIRNVNLDHYMKAIGVLDDERSKFWFQHYENTIEALFSKKSKRKIERIKTAYLCEYLWKNFCSYVALKYIDLGKGVYHFTMSDKLSLMNKNTNENGIKFGEVDSRFNKGISSFDYERIKAEETIDRNISTYTTFATNIFAKSVIKDSYIQKKAGNSDALQYDDETYYNRKAMNPDALKRVLQYWGGQSRWKSELEELNVAELCIDIKNRLSKIRNSGVHYTSTSTLKGNDDDSIVGMLIKKDFDDIKDVYASKYYSNNVWIFYNTDKISKMMEYLYQDDSNIRDAQIPAFNSVIKRKDMAEVIEKIIKKNSYKTIKEPYQREKYRSCLYFMLKEIYYNRFIKQDDLKDQVIQIIDSNTELIGDNSRAVDNLKKRIHDVDSQTMSFGELCQVIMTDYNMQNQENKSIKSKERQDKDRKNGIDNSYKHFPLLLHHLIKVSFLKFIKTDEKLAFIREPRITEYDKTLEQFEAQIQTVDIYNSLKMMVAENKSLLDWYTLAHFLMPKQLNHLIGDIKNYIQYLSNIDKRAGSVKNNKSASTEVKIRQYSEIVRILDFSLQYIGRASNDVTDYFVDEDEYAAFLSKYVEFSGNNTVSMKAFCQSRTANGKHTIGLYFDGANPIMNRNIVYAKMYGNDEILSYIYNKVTKKDIEKYYVSQDNLEKVFADGKCQDVQQQNALCDFQKMKNHIELTEVSIYTDILNDFMAQFISWAYFRERDLMYFQLGLNYIRIFYGTYELEEKYNKLHGENINIEKGALLYQIVAMYSHELPIYKVDESDIAILAEKQGSSGASIKSFVTEYCKEEMKKAYTYENGLELFEDVNRHDNLSKLRNDFAHMRYMSARDKSIMDIVSEIYNGFFIYDTKLKKSVSFIFKNILMRYAVDVNIEFCHKGDNEDTNNLIRIKDEVGLYSDKYTYKVEDNDTVDIEVRNSEFLEQLKKLLEYKKESKGSEL

SEQ ID NO: 2594 - protein, 512 aa, Unknown
  Description of Unknown: uncultivated organism sequence
  Category: MG81 effectors
  Description: MG81-880 effector
MPTKQKEGGNRCVLTLPLLTEPWQEHIIEKRFKIIEHLKNQLISIELRKLKKLQRTKAYKNLIKQIESVPKSERTVLYKERNKMLKDAGFSQYTFMDDMAGKKSLMQKHFESHINVQIAHKAAIDVWSSFEKFLFGTGQIVHYQKRGTLSSVASKSPKTGMFYYSDENIFKWSGGGTKPKGGIILCLRVASVKTNYEKEMVANNEIKYYRVVRKWMKTKYKYYLQITFAGKPADKHREISTGRVGIDIGTQTIAIASDKSVKLLELADKVNKNHIKKCELQRKLDRSRRYTNPDNFNPDGTVKRGTKGHKLKWNKSKHYLEVAGKIRELERKNADIRKYQHTCLANNILAMGNQIYIEPMNYKGLQKRAKETQVDEKGRYKKKKRFGKSLANKAPAMFVTILKTKAEQHGGEVYEVDIMSYRASQCDHTTGEYTKHGLNDRWRILGNGDKVQRDLYSAFLIKNSNKTHDEIDLDKCSKTYDSFKKLHDKEIENIRNEVILRKRRNISSYGIA

SEQ ID NO: 2595 - protein, 512 aa, Unknown
  Description of Unknown: uncultivated organism sequence
  Category: MG81 effectors
  Description: MG81-881 effector
MPTKQKEGGNRCVLTLPLLTEPWQEHIIEKRFKIIEHLKNQLISIELRKLKNLQRTKAYKNLMKRIESVPKSERTALYKERNKMLKDAGFSQYTFMDDMAGKKRLMQKHFESHINVQIAHKAAIDVWSSFEKFLFGTGQIVHYQKRGTLSSVASKSPKTGMFYYSDENIFKWSGGGTKPKGGIILCLRVASVKTNYEKEMVANNEIKYYRVVRKWMKTKYKYYLQITFAGKPADKHREISTGRVGIDIGTQTIAIASDKSVKLLELADKVNKNHIKKCELQRKLDRSRRYTNPDNFNPDGTVKRGTKGHKLKWNKSKHYLEVAGKIRELERKNADIRKYQHTCLANDILAMGNQIYIEPMNYKGLQKRAKETQVDEKGRYKKKKRFGKSLANKAPAMFVTILKTKAEQHGGEVYEVDIMLYRASQCDHTTGEYTKHGLNDRWRILGNGDKVQRDLYSAFLIKNSNKTHDEIDLDKCSKTYDNFKKLHDKEIENIRNEVKLRERRNISSYGIA

SEQ ID NO: 2596 - protein, 482 aa, Unknown
  Description of Unknown: uncultivated organism sequence
  Category: MG81 effectors
  Description: MG81-885 effector
MPTKQKEGGNRCVLTLPLLTEPWQEHIIEKRFKIIEHLKNQLISIELRKLKNLQRTKAYKNLMKRIESVPKSERTALYKERNKMLKDAGFSQYTFMDDMAGKKSLMQKHFESHINVQIAHKAAIDVWSSFEKFLFGSGQMIHYQKRGTLSSVASKSPKTGMFYYSDENIFKWSGGGTKPKGGIILCLRVASVKTNYEKEMVANNEIKYYRVVRKWMKTKYKYYLQITFAGKPADKHREISTGRVGIDIGTQTIAIASDKSVKLLELADKVNKNHIKKCELQRKLDRSRRYTNPDNFNPDGTVKRGTKGHKLKWNKSKHYLEIAGKIRELERKNADIRKYQHTCLANDILAMGNQIYIEPMNYKGLQKRAKETQVDEKGRYKKKKRFGKSLANKAPAMFVTILKTKAEQHGGEVYEVDIMSYRASQCDHTTGEYTKHGLNDRWRILGNGDKVQRDLYSAFLIKNSNKTHDEICLLYTSDAAAN

SEQ ID NO: 2597 - protein, 1134 aa, Unknown
  Description of Unknown: uncultivated organism sequence
  Category: MG81 effectors
  Description: MG81-886 effector
MKYVIGMDIGIGSIGWSVIRSDADCKRIEDFGVRIFEPGENASDRKSNSQIRREYRSVRRVLRRRKHRKELLKAHLENIGLTTIDRINEYFKHADGDIISLRVKGLDKKLAPEEIAACLINIANRRGYRPFYENEELSQYEKTSLNKTRQFMLSGEYRTSAEMILKNEQFDSEESEYRSYRNRSGNEETVLIERKWLRDEVEKILKKQSEFYPCLNDRNTNAIKRIIFDQRDFEDGPGDKNDPFRRYTGFLESMGQCRFYPDEKRGYRATLTADTYSLVNELSQYSYVDENGCFVFDSALAHDLIASALKNAKLTKSDFNKICKAHGIVPIYGGKGKDTDISRCFKFLKAIKPILEADGFDWETVCNIDTASDPDSILNRIGIIVSENITPARRKKALKNLNILNDDSITALCNYKFGGTSSVSYKYMSGAIEAFLNGDIYGKHQASHIEETATESVKHTKLPVFDKDFEFFKNPVVFRAINESRKVINAIIEKYGSPSAINIEVGSEVSRSFANRTADKNEQTKRMKEKDAAKKAIAELLGVDIASVTSKMIDRYFLGELQGWKCMYSGKEINKEECLRGSKAYEIDHIVPFSLILDNTLNNKALVLTSENQLKKQQTPLMYLSGERRKNFIGTVNELFRAKKIKKKKYAYLLQPDLNDEKMSEWKSRNLNDMRHISRFMVGYLKENLKFDNSSKSEGRWQNVYAVKGSLTSMFRKLWLNETTWGRADKASIKAETYLDHAVDAVVIGNCLPVYVEIAQVNLRLRDIYKSNGRQFVAEYWDCFNKGVEMISRYYNIDKDTVRAFLKKSDRIPSLIPDLREEVDRRFVDHAIYSKYQKEIADHEGKKFKEPTYEEAEQAYRVSMENLYPTDLQFAHGLSMPLISCKPERKYRGEITAANPVKLREIDGKLYTLSKKEIGKIERKDIEKIYTSDANLIAYLIELFDGAKDTATLGDIMKEKGISEIRTKNGNAIRKLTLRNICNKDFLKKEIDENNHTYLDTAKYYCVELYKDIKNQLQVQGIKRADIILQNGKLCLAPWYKQPDDYFKHVMYLQKNDYLKVYKNGKLSFCGYYRSAAGLTNSRLYFIIDNQPEDKKKYITLKLEVKKYPVDILGKIGKKEIKCGEPLSSAKVKK

SEQ ID NO: 2598 - protein, 1134 aa, Unknown
  Description of Unknown: uncultivated organism sequence
  Category: MG81 effectors
  Description: MG81-887 effector
MKYVIGMDIGIGSIGWSVIRSDADCKRIEDFGVRIFDPGENASDRKSNSQIRREYRSVRRVLRRRKHRKELLKAHLENIGLTTIDRINEYFKHADGDIISLRVKGLDKKLAPEEIAACLINIANRRGYRPFYENEELSQYEKTSLNKTRQFMLSGEYRTSAEMILKNEQFDSEESEYRSYRNRSGNEETVLIERKWLRDEVEKILKKQSEFYPCLNDRNTNAIKRIIFDQRDFEDGPGDKNGPFRRYTGFLESMGQCRFYPDEKRGYRATLTADTYSLVNELSQYSYVDENGCFVFDSALAHDLIASALKNAKFTKSDFNKICKAHGIVSIYGGKGKDTDISRCFKFLKAIKPILEADGFDWETVCNIDTASDPDSILNRIGIIVSENITPARRKKALKNLNILNDDSITALCNYKFGGTSSVSYKYMSGAIEAFLNGDIYGKHQASHIEETATESVKHTKLPVFDKDFEFFKNPVVFRAINESRKVINAIIEKYGSPSAINIEVGSEVSRSFANRTADKNEQTKRMKEKDAAKKAIAELLGVDIASVTSKMIDRYFLGELQGWKCLYSGKEINKEECLRGSKAYEIDHIVPFSLILDNTLNNKALVLTSENQSKKQQTPLMYLSGERRKNFIGTVNELFRAKKIKKKKYAYLLQPDLNDEKMSEWKSRNLNDMRHISRFMVGYLKENLKFDNSSKSEGRWQNVYAVKGSLTSMFRKLWLNETTWGRADKASIKAETYLDHAVDAVVIGNCLPVYVEIAQVNLRLRDIYKSNGRQFVAEYWDCFNKGVEMISRYYNIDKDTVRAFLKKSDRIPSLIPDLREEVDRRFVDHAIYSKYQKEIADHEGKKFKEPTYEEAEQAYRVSMENLYPTDLQFAHGLSMPLISCKPERKYRGEITAANPVKLREIDGKLYTLSRKEIGKIERKDIEKIYTSDTQLIAYLIELFDGAKDTATLGDIMKEKSISEIRTKNGNAIRKLTLRNICNKDFLKKEIDENNHTYLDTAKYYCVELYKDIKNQLQVQGIKRADIILQNGKLCLAPWYKQPDDYFKHVMYLQKNDYLKVYKNGKLSFCGYYRSAAGLTNSRLYFIIDNQPEDKKKYITLKLEVKKYSVDILGKIGKKEIKCGEPLSSAKVKK

SEQ ID NO: 2599 - protein, 558 aa, Unknown
  Description of Unknown: uncultivated organism sequence
  Category: MG81 effectors
  Description: MG81-888 effector
MVKKTSTDADTTLRAYKFRLDPTQAQKIALAQCAGAARYAYNLLTAHNLEVSRTRADYWHTRIDAGADETTVKADLKALAKSDVAYKSIGYAAYGTQYLTPEINRHRAASNAITDGADPTAVWPETERSSEPWMHTIPRRVLVSGLQSADKAWKNFFDSRTGARAGRLVGTPRFKRKGSSRDSFTVHHETTGAYGTYYHKKDPEYARRKAQLKRRGINAKPTITDYRHVRLSHLGVIRTHNTTKPLVKAVRAGAQIRSYTVSRAANRWYVSILVELTRPSATPTHAQRSAGAVGVDLGVRYLAVLSDEQAPQRFARYPSLEFTGDGAPTLANPRWARAAEKRLVRLQRALARAQKGSKRRARLVQQIARHHHLVALRRESGLHQVSKRLTTGYTLIGLEDLAVAGMTASAAGTVEAPGKNVRQKAGLNRSILDAAFSTLRRQLEYKSSWYGSQVQIIDRFFASSQTCSACGARTKTKLDLRVRVFECAACGVRIDRDVNAARNIRAEAVRMYEAQLAPGTGESLNGRGATDSDAAGSVALGDVALDAPRPAASGGGSP

SEQ ID NO: 2600 - protein, 567 aa, Unknown
  Description of Unknown: uncultivated organism sequence
  Category: MG81 effectors
  Description: MG81-889 effector
MAKRKKHQITEYEKCLREYHKASPRHVIVLETDLLEDEKRHLFHQADLLRQCGNELLGIMKRHLDQLLRTKKYRGLRKSYGKISKSIKNLQQIKKLSNVQKQHLKDLQKDLRTISNLMNEMQKSYHVTWEYCRNTMKTLRLKYEQTSVIALSRAEDIWTAVSKVLYSDGERLHFKKRGDLSELRAKQFHKEIIGRVKNGFLEFRYGKVSLPVIRKETDLWLMNELEAVESYLKDPDFHDAYAINQMQQGEIVSTYRPCYASIVCKTIRGKLRVYLHLTVEGLPFSKRTNDGIIKHPYGNGPVGCDIGTQTIAYTSDHTVGLENLAERGNSICYVERWQRLVQRAMDRSRRAMNPDNYNDDGTIRKGKKTWIKSKRYQKLQLRYRELCRISAENRRLAIHEQVHKMRSLGDIFVTEAKNAKKLQKRANPENPLDKNGRPKRKKRFGRSIQNRCPGYFQAKVKQLFESTGGTYIEVPSDYRASQYDHTVDDYIKKKLSQRMYNLKDGTKVQRDWYSSFLLYCIDLITKTIDRQKCLATFETQLNKEHAMIEEIIHLKKHIMNSGIRVAV

SEQ ID NO: 2601 - protein, 1134 aa, Unknown
  Description of Unknown: uncultivated organism sequence
  Category: MG81 effectors
  Description: MG81-890 effector
MKYVIGMDIGIGSIGWSVIRSDADCKRIEDFGVRIFDPGENASDRKSNSQIRREYRSVRRVLRRRKHRKELLKAHLENIGLTTIDRINEYFKHADGDIISLRVKGLDKKLAPEEIAACLINIANRRGYRPFYENEELSQYEKTSLNKTRQFMLSGEYRTSAEMILKNEQFDSEESEYRSYRNRSGNEETVLIERKWLRDEVEKILKKQSEFYPCLNDRNTNAIKRIIFDQRDFEDGPGDKNDPFRRYTGFLESMGQCRFYPDEKRGYRATLTADTYSLVNELSQYSYVDENGCFVFDSALAHDLIASALKNAKFTKSDFNKICKAHGIVPIYGGKGKDTDISRCFKFLKAIKPILEADGFDWETVCNIDTASDPDSILNRIGIIVSENITPARRKKALKNLNILNDDSITALCNYKFGGTSSVSYKYMSGAIEAFLNGDIYGKHQASHIEETATESIKHTKLPVFDKDFEFFKNPVVFRAINESRKVINAIIEKYGSPSAINIEVGSEVSRSFANRTADKNEQTKRMKEKDAAKKAIAELLGVDIASVTSKMIDRYFLGELQGWKCLYSGKEINKEECLRGSKAYEIDHIVPFSLILDNTLNNKALVLTSENQLKKQQTPLMYLSGEQRKNFIGTVNELFRAKKIKKKKYAYLLQPDLNDEKMSEWKSRNLNDMRYISRFMVGYLKENLKFDNSSKSEGRWQNVYAVKGSLTSMFRKLWLNETTWGRADKASIKAETYLDHAVDAVVIGNCLPVYVEIAQVNLRLRDIYKSNGRQFVAEYWDCFNKGVEMISRYYNIDKDTVRAFLKKSDRIPSLIPDLREEVDRRFVDHAIYSKYQKEVADHEGKDFKKPTYEEAEQAYRVSMENLYPTDLQFAHGLSMPLISCKPERKYRGEITAANPVKLREIDGKLYTLSKKEIGKIERKDIEKIYTSDANLIAYLIELFDGAKDTATLGDIMKEKGISEIRTKNGNAIRKLTLRNICNKDFLKKEIDENNHTYLDTAKYYCVELYKDIKNQLQVQGIKRADIILQNGKLCLAPWYKQPDDYFKHVMYLQKNDYLKVYKNGKLSFCGYYRSAAGLTNSRLYFIIDNQPEDKKKYITLKLEVKKYPVDILGKIGKKEIKCGEPLSSAKVKK

SEQ ID NO: 2602 - protein, 359 aa, Unknown
  Description of Unknown: uncultivated organism sequence
  Category: MG81 effectors
  Description: MG81-891 effector
MRGYSVTGKSGGVEIIFRETYIEWKGLKLPLKRSPDNAYETEMLSRRVKYVRLLRKPGKRKDRWYAQLSLEGKPAIKHDPESGELRHAIGRGAVGLDIGPQTLAYSACGAADLVELADQVQNIEQMKRRLQRKLDRSRRATNPDNYADNGTIRRGVKLTHNKSNRYRRTQRELRYLQHCQAEIRKRQHIELANHLLALGDCFYVEDMAWPSLTHRAKETAISEKTGRIKRKKRFGKSVANKAPATLIGILEQKCNSLGLPGVMKVPTSLRASQYNHQSGEYTSKPLSQRWNDMPDGERIQRDLYSAFLLQHYDPQAGNFNSALLQQDYPQFVQYHHRAIQRLSTAPKTLSSMGIQRSLR

SEQ ID NO: 2603 - protein, 495 aa, Unknown
  Description of Unknown: uncultivated organism sequence
  Category: MG81 effectors
  Description: MG81-892 effector
MPKEEKESCCVLQLRLYPEPWQVQIIETRFKVLEHLKNSLIALELRKLRNLERTRAYREIQEQIKLADDKSKIKLYAKRRKLLKDAGFSEFVFKDDITPMQKHFAAHIATHVAHRAASEVWRAFDKFLFGNGKMVHYVRRGTLRSASNQTAGTTMTLENGYFKWNGGRDQNSIAINIRVAKPTTYYEKEMLQKKAKYFRIVRKWGKIGYKYYLQITLAGLPAVKPRLIANEKKVGIDIGPSSIAIVSDKKVELRALADKVQNNHIEKCSLQRSMDRSRRNLNPQNYNEDGTIRRGIRLNWTFSKHYIEMRGKVRMLERKNVDIRKYQHTCLANEVILLGTDVYIEQMSFKGLQRRAKETTYREDGRPKRKKRFGKSIANRAPAMFVEILGRKLTTIVGTELNKVDTFKFRASQYDHTNGSYKKKLLKERWAQLSNGDRIQRDLYSAFLLKNSNADLNSTNVEQCNATYDAFKIMHDDCITKLKSEKKSCLPSFGV

SEQ ID NO: 2604 - protein, 521 aa, Unknown
  Description of Unknown: uncultivated organism sequence
  Category: MG81 effectors
  Description: MG81-893 effector
MMVTWKGGIPVGKSSTDTCCLTLPLKLEKWQEDRLAKRFEIARQIYNTMVRAELKKLDRVKQLPEYRKNQKEIQALDGKNSADRARLKELRANQNRILQKQGFTKYGFKSDSKDYYKHFIENIGSSVATHCIAPQVWNAFDKMLFQKDGKVVHFKRYGDVHSLKGGSVTNKSGGAEIMFRKTYIEWKGLKLPLKLSPNNAYEAEMLSYRVKYVRILRTRGKTKDRWYAQLSLEGKPAVKYDSSTGKPVHPVGRGAVGLDIGPQTLAYAAANEANLVELADQVQNIEQEKRRLQRKLDRSRRATNPDNYNENGTIRRGVKLTHNKSKRYCKLQKELSWIQHCQAETRKRQHIALANHLLSLGDCFYVEPMAWPSLTHRAKKTEVSEETGRIKRKKRFGKSVANKAPASLIGILRLKCISLGLTGVVEVPMLLRASQYNHQSKDYAKKSLSQRWNDMPDGNRIQRDLYSAFLLQHYNSQSESFDQETLERDYPQFVRLHNQTIQRLSALPKTPSSMGIRRSVS

SEQ ID NO: 2605 - protein, 541 aa, Unknown
  Description of Unknown: uncultivated organism sequence
  Category: MG81 effectors
  Description: MG81-894 effector
MVQSTADAEAKSVMYRAYKFRLDPNNEQVKALYQAAGAARYTYNMMTAYNLEIKKNRDEFWYAHITEDSDEQYKKQVESQLKALEKAEPARYKPLCQYASFSTQKLTPAKHKHKEVSEAIAQGVLPNDAWGSEEHPKNPWLHEANQRVLVSGLQNSAKAWKNFWDSQTGRRKGAKVNLPRLKKRGISRDSFTVPAPEAMGGYGAPYKNDSEQYKRLKKKGKDAVIQDYRHVRLSYLGVLRTFNSTKPLAKAVNTGAKIKSYTVSRNADRWYVSFLVELSEPIARPATKKQRAAGGVGIDLGVKTLVTLSDESNPYIANLRPGQRAQRKLKKLQQKFARSQKGSNRRARLAAEIARLHHKVALRRKGYLDQVTKGLVTQYSAVACEDLNVSGMVHSAKGTVENPGKNVAAKSGLNRSILDASFGMFIRQLEYKSAWYGSVVLKVDKWFPSSRTCFNCGEVKSKLPLSERVYDCQYCGYSADRDLNAARNILEQAYKEKEDKQNPQFAPERGENSNGRGRGSTCSVESGETSRPADGSAGHRR

SEQ ID NO: 2606 - protein, 519 aa, Unknown
  Description of Unknown: uncultivated organism sequence
  Category: MG81 effectors
  Description: MG81-895 effector
MIQPELKAYRRCSDRHVLVLETNLTYVEKCQIFHYADLVRKAGNELTGIMKKRYDQLVRTKRYRKLKSLYKKYKDADNKKALKDICDQMKEMQKQYDVTWDYCRTSMIPIGKKYGIDAVFALTKAENVFRGIEKCLYSDGETIHFKKRGDLPCIRAKQINRGIIMKQMNFKFKDIEFGVKIKDRYEQEEVNAILYYLKHAEFMDFIAANTYKETNICISTYRPCYVSLVCKKIRGKLRVYVHITIEGLSKPKQDRFGNFKHNKGKGIVGCDIGTQTIAYTTETKAGLKNLAERGSCIEVNERKERRIYRAMDRSRRAMNPDNYNEDGTIKKGKKKWTYSNRYKKLRTKHTELCRINATNRHLAINEDVNELRSLGDVFVTEPKNAKKLQKKAKTGKRKKRFGRSIKNRCPGYFQSQAKRKFRIYVEVPNDYKASQYDHTSDEYIKKSLSQRMYKLSDGTMVQRDLYSSFLLYCIDLNTNRIDKNKCIHEFKKQYKNQNETIEYIQMNQIKVMNSGIRVN

SEQ ID NO: 2607 - protein, 587 aa, Unknown
  Description of Unknown: uncultivated organism sequence
  Category: MG81 effectors
  Description: MG81-896 effector
MRKGNKPTDGLLWYPRRAVFDTSHQKRPCALRGGNGGHDAGWARSRWRTALTTGTGACYAPVSGGERTDSPTEVGRHPDAFEVTLPRLFAFGFGCGGFVLREAFMADHRKIYNTMVRAELKKLDRVKQLPEYRKNQKEIQALDWKNSADKQRLKELYGNQRKILQKQGFTEYGFKSDSKDYYKHFIENIGSSVATHGIAPQVWNAFDKMLFQKDGKVVHFKRYGDVHSLKGGSVAHKSGGAEIMFRKTYIEWKGLKLPLKLSPNNAYEAEMLSYRVKYVRILRTRGKTKDRWYAQLSLEGKPAVKYDSNTGKPVHPVGRGAVGLDIGPQTLAYAAANEENLVELADQVQNIEQEKRRLQRKLDRSRRATNPDNYNENGTIRRGVKLTHNKSKRYCKLQKELSWIQHCQAETRKRQHIALANHLLSLGDCFYVEPMAWPSLTHRAKKTEVSEKTGRIKRKKRFGKSVANKAPASLIGILKLKCISLGLTGVVEVPMLLRASQYNHQSKDYAKKSLSQRWNDMPDGNRIQRDLYSAFLLQHYNSQSESFDQETLERDYPQFVRLHNQTIQRLSALPKTPSSMGIRRSVS

SEQ ID NO: 2608 - protein, 1134 aa, Unknown
  Description of Unknown: uncultivated organism sequence
  Category: MG81 effectors
  Description: MG81-897 effector
MKYVIGMDIGIGSIGWSVIRSDADCKRIEDFGVRIFEPGENASDRKSNSQIRREYRSVRRVLRRRKHRKELLKAHLENIGLTTIDRINEYFKHADGDIISLRVKGLDKKLAPEEIAACLINIANRRGYRPFYENEELSQYEKTSLNKTRQFMLSGEYRTSAEMILKNEQFDSEESEYRSYRNRSGNEETVLIERKWLRDEVEKILKKQSEFYPCLNDRNTNAIKRIIFDQRDFEDGPGDKNDPFRRYTGFLESMGQCRFYPDEKRGYRATLTADTYSLVNELSQYSYVDENGCFVFDSALAHDLIASALKNAKFTKSDFNKICKAHGIVPIYGGKGKDTDISRCFKFLKAIKPILEADGFDWETVCNIDTASDPDSILNRIGIIVSENITPARRKKALKNLNILNDDSITALCNYKFGGTSSVSYKYMSGAIEAFLNGDIYGKHQASHIEETATESVKHTKLPVFDKDFEFFKNPVVFRAINESRKVINAIIEKYGSPSAINIEVGSEVSRSFANRTADKNEQTKRMKEKDAAKKAIAELLGVDIASVTSKMIDRYFLGELQGWKCLYSGKEINKEECLRGSKAYEIDHIVPFSLILDNTLNNKALVLTSENQLKKQQTPLMYLSGERRKNFIGTVNELFRAKKIKKKKYAYLLQPDLNDEKMSEWKSRNLNDMRYISRFMVGYLKENLKFDNSSKSEGRWQNVYAVKGSLTSMFRKLWLNETTWGRADKASIKAETYLDHAVDAVVIGNCLPVYVEIAQVNLRLRDIYKSNGRQFVAEYWDCFNKGVEMISRYYNIDKDTVRAFLKKSDRIPSLIPDLREEVDRRFVDHAIYSKYQKEIADHEGKKFKEPTYEEAEQAYRVSMENLYPTDLQFAHSLSMPLISCKPERKYRGEITAANPVKLREIDGKLYTLSKKEIGKIERKDIEKIYTSDTQLIAYLIELFDGAKDTATLGDIMKEKGISEIRTKNGNAIRKLTLRNICNKDFLKKEIDENNHTYLDTAKYYCVELYKDIKNQLQVQGIKRADIILQNGKLCLAPWYKQPDDYFKHVMYLQKNDYLKVYKNGKLSFCGYYRSAAGLTNSRLYFIIDNQPEDKKKYITLKLEVKKYPVDILGKIGKKEIKCGEPLSSAKVKK

SEQ ID NO: 2609 - protein, 1138 aa, Unknown
  Description of Unknown: uncultivated organism sequence
  Category: MG81 effectors
  Description: MG81-898 effector
MKYVIGMDIGIGSIGWSVIRSDADCKRIEDFGVRIFEPGENASDRKSNSQIRREYRSVRRVLRRRKHRKELLKAHLENIGLTTIDRINEYFKHADGDIISLRVKGLDKKLAPEEIAACLINIANRRGYRPFYENEELSQYEKTSLNKTRQFMLSGEYRTSAEMILKNEQFDSEESEYRSYRNRSGNEETVLIERKWLRDEVEKILKKQSEFYPCLNDRNTNAIKRIIFDQRDFEDGPGDKNDPFRRYTGFLESMGQCRFYPDEKRGYRATLTADTYSLVNELSQYSYVDENGCFVFDSALAHDLIASALKNAKFTKSDFNKICKAHGIVPIYGGKGKDTDISRCFKFLKAIKPILEADGFDWETVCNIDTASDPDSILNRIGIIVSENITPARRKKALKNLNILNDDSITALCNYKFGGTSSVSYKYMSGAIEAFLNGDIYGKHQASHIEETATESVKHTKLPVFDKDFEFFKNPVVFRAINESRKVINAIIEKYGSPSAINIEVGSEVSRSFANRTADKNEQTKRMKEKDAAKKAIAELLGVDIASVTSKMIDRYFLGELQGWKCMYSGKEINKEECLRGSKTYEIDHIVPFSLILDNTLNNKALVLTSENQLKKQQTPLMYLSGERRKNFIGTVNELFRAKKIKKKKYAYLLQPDLNDEKMSEWKSRNLNDMRYISRFMVGYLKENLKFDNSSKSEGRWQNVYAVKGSLTSMFRKLWLNETTWGRADKASIKAETYLDHAVDAVVIGNCLPVYVEIAQVNLRLRDIYKSNGRQFVAEYWDCFNKGVEMISRYYNIDKDTVRAFLKKSDRIPSLIPDLREEVDRRFVDHAIYSKYQKEVADHEGKDFKKPTYEEAEQAYRVSMENLYPTDLQFAHGLSMPLISCKPERKYRGKITADNPVKLREIDSKLYTLSKKEIGKIERKDIEKIYTSDTQLIAYLIELFDGAKDTATLGDIMKEKGISEIRTKNGNAIRKLTLRNICNKDFLKKEIDENNHTYLDTAKYYCVELYKDIKDKLRVQGIKRADIIPQNGKLCLAPWYKQPDGFFKHVMYLQKNDYLKVYENGELLFCGYYLSVEDIRNSKLYFIIDNQPGQNRKENCKSIHIKSEVKKYTVDILGKIGKKEIKCGEPLSSAKVKK

SEQ ID NO: 2610 - protein, 1136 aa, Unknown
  Description of Unknown: uncultivated organism sequence
  Category: MG81 effectors
  Description: MG81-899 effector
MKYVIGMDIGIGSIGWSVIRSDADCKRIEDFGVRIFDPGENAGDRKRKSNSQIRREYRSVRRVLRRRKHRKELLKAHLENIGLTTIDRINEYFKHADGDIISLRVKGLDKKLAPEEIAACLINIANRRGYRPFYENEELSQYEKTSLNKTRQFMLSGEYRTSAEMILKNEQFDSEESEYRSYRNRSGNEETVLIERKWLRDEVEKILKKQSEFYPCLNDRNTNAIKRIIFDQRDFEDGPGDKNDPFRRYTGFLESMGQCRFYPDEKRGYRATLTADTYSLVNELSQYSYVDENGCFVFDSALAHDLIASALKNAKFTKSDFNKICKAHGIVPIYGGKGKDTDISRCFKFLKAIKPILKADGFDWETVCNIDTASDPDSILNRIGIIVSENITPARRKKALKNLNILNDDSITALCNYKFGGTSSVSYKYMSGAIEAFLNGDIYGKHQASHIEETATESIKHTKLPVFDKDFEFFKNPVVFRAINESRKVINAIIEKYGSPSAINIEVGSEVSRSFANRTADKNEQTKRMKEKDAAKKAIAELLGVDIASVTSKMIDRYFLGELQGWKCLYSGKEINKEECLGGSKAYEIDHIVPFSLILDNTLNNKALVLTSENQLKKQQTPLMYLSGERRKNFIGTVNELFRAKKINKKKYAYLLQPDLNDEKMSEWKSRNLNDMRYISRFMVGYLKENLKFDNSSKSEGRWQNVYAVKGSLTSMFRKLWLNETTWGRADKASIKAETYLDHAVDAVVIGNCLPVYVEIAQVNLRLRDIYKSNGRQFVAEYWDCFNKGVEMISRYYNIDKDTVRAFLKKSDRIPSLIPDLREEVDRRFVDHAIYSKYQKEIADHEGKKFKEPTYEEAEQAYRVSMENLYPTDLQFAHGLSVPLISCKPERKYRGEITAANPVKLREIDGKLYTLSRKEIGKIERKDIEKIYTSDTQLIAYLIELFDGAKDTATLGDIMKEKSISEIRTKNGNAIRKLTLRNICNKDFLKKEIDENNHTYLDTAKYYCVELYKDIKNQLQVQGIKRADIILQNGKLCLAPWYKQPDDYFKHVMYLQKNDYLKVCKNGKLSFCGYYRSAAGLTNSRLYFIIDNQPEDKKKYITLKLEVKKYSVDILGKIGKKEIKCGEPLSSAKVKK

SEQ ID NO: 2611 - protein, 495 aa, Unknown
  Description of Unknown: uncultivated organism sequence
  Category: MG81 effectors
  Description: MG81-900 effector
MPKEEKESCCVLQLRLYPEPWQVQIIETRFKVLEHLKNSLIALELRKLRNLEKTRAYREIQEQIKLADDKSKIKLYAKRRKLLKDAGFSEFVFKDDITPMQKHFAAHIATHVAHRAASEVWRAFDKFLFGNGKMVHYVRRGTLRSASNQTAGTTMTLENDYFKWKGGRDKNSIAINIRVAKPTTYYEKEMLQKKAKYFRIVRKWGKIGYKYYLQITLAGLPAVKPRLIANEKKVGIDIGPSSIAIVSDKKVELRALADKVQNNHIEKCSLQRSMDRSRRNLNPQNYNEDGTIRRGIRLNWTFSKHYIEMRGKVRMLERKNVDIRKYQHTCLANEVISLGTDVYIEQMSFKGLQRRAKETTYREDGRPKRKKRFGKSIANRAPAMFVEILGRKLTTIVGTELNKVDTFKFRASQYDHTNGSYKKKLLKERWAQLSNGDRIQRDLYSAFLLKNSNADLNSTNVEQCNATYDVFKIMHDDCITKLKSEKKSCLPSFGV

SEQ ID NO: 2612 - protein, 559 aa, Unknown
  Description of Unknown: uncultivated organism sequence
  Category: MG81 effectors
  Description: MG81-901 effector
MAKKISTDADTTLRAYKFRLDPTQAQASALAQCAGAARYAYNLLTAHNLDVSRARADYWHTRIDAGADETTVKAELKALAKSDAAYKSIGYAAYGTQHLTPEINRHRAASKAIESGADPAIVWPETERSSEPWMHTIPRRVLVSGLQSADKAWKNFFDSRTGVRAGRLVGTPRFKRKGVSRDSFTIPAPETIGAYGTAYLRGEPEYARRKAQLKRCGIKTTPTIEDYRHVRLSHLGVIRTHDTTRHLVKAVRAGAQVRSYTVSRAANRWYVSILVELTRPSASPTRAQRSAGAVGVDLGVRYLAALSDEQAPQRFAQYPSLEFTGDGAPTLANPRWARAAEKRLVRLQRALSRAQKGSNRRARIVQQIARHHHLVALRRESGLHQVSKRLSTGYTLIGLEDLAVAGMTASAAGTIEAPGKNVRQKAGLNRSILDAAFSTLRRQLEYKASWYGSQVQIIDRFFASSQMCSACGARAKTKLDLRVRVFECAACGVRIDRDVNAARNIRAEAVRMYEAQLAPGTGESLNGRGVTDSDAAGSVVLGDVALDASRPAASGGGSP

SEQ ID NO: 2613 - protein, 521 aa, Unknown
  Description of Unknown: uncultivated organism sequence
  Category: MG81 effectors
  Description: MG81-902 effector
MSTAAETSSAPQGTIERHVAFKFCLDPNQEQLVALGRDGGASRATYNMLVGYNTDVMKTRNKYWAKRREEGATDDEIKAELKTLTKEDPKFKALGYMAFAKNHLTPEIAHHRACAKAIEEGTPVEEVWGEGERSKEPWLHTVSRRVLVSGLMSADKALKNFFDSRTGKRAGGKMGAPKFKSRASNSDSFTIYAPDTMGGYGAPYLRGEPAYHDAKARMKRRGDKGTPTIGDYRHVRLAHLGTFRIHGNTRRMMRTIRKGGVIKSFTVSQVADRWYVSFLVEMTVPSPKSTRKQKKAGAVGVDLGVKYMAALSDTDAPKRFNPDSGVNFTDGTKPTIENPRWLKHAENRIAKLQQKIARQVKGSNRRTLNVRKLAKTHHIVALRRETGLHQLTKNLTTRYALIGIEDLNVAGMTASASGTVENPGKNVAQKAGLNRAVLDVAFGTFRSQLEYKSAWYGSAVQVIDRYYPSSQTCSNCGKRPDAKLTLNNRVYKCGHCHAVIDRDLNAAINIRREAERLHAEA

SEQ ID NO: 2614 - protein, 1134 aa, Unknown
  Description of Unknown: uncultivated organism sequence
  Category: MG81 effectors
  Description: MG81-903 effector
MKYVIGMDIGIGSIGWSVIRSDADCKRIEDFGVRIFDPGENASDRKSNSQIRREYRSVRRVLRRRKHRKELLKAHLENIGLTTIDRINEYFKHADGDIISLRVKGLDKKLAPEEIAACLINIANRRGYRPFYENEELSQYEKTSLNKTRQFMLSGEYRTSAEMILKNEQFDSEESEYRSYRNRSGNEEIVLIERKWLRDEVEKILKKQSEFYPCLNDRNTNAIKRIIFDQRDFEDGPGDKNDPFRRYTGFLESMGQCRFYPDEKRGYRATLTADTYSLVNELSQYSYVDENGCFVFDSALAHDLIASALKNAKFTKSDFNKICKAHGIVPIYGGKGKDTDISRCFKFLKAIKPILEADGFDWETVCNIDTASDPDSILNRIGIIVSENITPARRKKALKNLNILNDDSITALCNYKFGGTSSVSYKYMSGAIEAFLNGDIYGKHQASHIEETATESVKHTKLPVFDKDFEFFKNPVVFRAINESRKVINAIIEKHGSPSAINIEVGSEVSRSFANRTADKNEQTKRMKEKDAAKKAIAELLGVDIASVTSKMIDRYFLGELQGWKCLYSGKEINKEECLRGSKAYEIDHIVPFSLILDNTLNNKALVLTSENQLKKQQTPLMYLSGEQRKNFIGTVNELFRAKKIKKKKYAYLLQPDLNDEKMSEWKSRNLNDMRHISRFMVGYLKENLKFDNFSKSEGRWQNVYAVKGSLTSMFRKLWLNETTWGRADKASIKAETYLDHAVDAVVIGNCLPVYVEIAQVNLRLRDIYKSNGRQFVAEYWDCFNKGVEMISRYYNIDKDTVRAFLKKSDRIPSLIPDLREEVDRRFVDHAIYSKYQKEIADHEGKKFKEPTYEEAEQAYRVSMENLYPTDLQFAHGLSMPLISCKPERKYRGEITAANPVKLREIDGKLYTLSKKEIGKIERKDIEKIYTSDTQLIAYLIELFDGAKDTATLGDIMKEKGISEIRTKNGNAIRKLTLRNICNKDFLKKEIDENNHTYLDTAKYYCVELYKDIKNQLQVQGIKRADIILQNGKLCLAPWYKQPDDYFKHVMYLQKNDYLKVYKNGKLSFCGYYRSAAGLTNSRLYFIIDNQPEDKKKYITLKLEVKKYPVDILGKIGKKEIKCGEPLSSAKVKK

SEQ ID NO: 2615 - protein, 537 aa, Unknown
  Description of Unknown: uncultivated organism sequence
  Category: MG81 effectors
  Description: MG81-904 effector
MISDEEYKKLLKQYHKLSDRHILVVETDMPYSDVLKVVILSDKIRKAGNELVSFMRKNYDQLIRTKKYRKLLKLYGSTKDKKKRKDLADQLNEMQKAYNVTWDYCRKSMIPIGKKYGIDAVFALTKAEDVWRGIEKCLYGNGKAIHFSKYGELPCIRAKQINRGIPISVKDDRLQFKLGKTAFGIQVNDRFQQDEADAVLTYLAESEIVDNKAVNTLMEDAYYIDTYRPCYATLVIKMIRGRYRIYLHLTIEGKAKPKYDKYGNLRHKYGKGMIGADIGTQTVAYTSDTEVGLKNLSERGNSIQTSERKERLLYRAMDRSRRAANPQNYNEDGTVKKGRKTWKYSNHYKKLKAKHSELCRINAVNRQLAINEDANHLRSLGDTFVTEPKNASKLMKRAKETAVNDKGRFNKKKRFGKSIKNRCPSGFQTTVEKKFKTTGGTYIEVPNNYRASQYDHTVDDYIKKKLSDRLYKLQDGTEVQRDWYSSFLLYCYDYKIQNIDKNKCITKFDNCYKKEKALITWIKAHKIKVLNSGIKIA

SEQ ID NO: 2616 - protein, 567 aa, Unknown
  Description of Unknown: uncultivated organism sequence
  Category: MG81 effectors
  Description: MG81-905 effector
MTKRKKHQITEYEKCLREYHKASPRHVIVLETDLTEDEKRHLFHQADLLRQCGNELLGIMKRHLDQLLRTKKYRGLRKSYGKISKSIKSLQQIKELSNVQKRHLKDQKKNLQTVSDQMNEMQEEYHITWEYCRNTMKTLRLKYEQTSVIALSRAEDIWAAVSKVLYSDGERLHFKKRGDLPELRAKQFHKEIIGRVKNGSLEFRYGKVSLPVIRKETDLWLMDELEAVESYLKDPSFHDAYAIDQMKHGEIVSTYRPCYASIVCKTIRGKLRVYLHLTVEGLPFPKRTKDGVIKHLCGDGIVGCDIGTQTIAYTSDHVVGLENLAERGNSIRCVERQQRLVQRAMDRSRRAMNPDNYNADGTIRKGKKTWIKSKRYQKLQLSYRELCRVSAENRKLAIHEQVHKMRSLGDVFVTEAKNAKKLQKRANPEDPLNKNGKPKRKKRFGRSIQNRCPGYFQAKIQQLFESTGGTYIEVPSDYRASQYDHTVDDYIKKKLSQRMFNLKDGTKVQRDWYSSFLLYCIDLITKTIDRQKCLATFETQLNKEHAMIEEIIRLKKRIMNSGIRVAA

SEQ ID NO: 2617 - protein, 606 aa, Unknown
  Description of Unknown: uncultivated organism sequence
  Category: MG81 effectors
  Description: MG81-906 effector
MKPDHIHVFVDVPQTAATCDVVGTFKDISAIELFKAFPQLIQSYAGCGILWSRGYFVSTVIKIILRSRKMITDKGHKRHLKQFHKFSDRHILAIETDMPYSDIQKVVKLSNKIRKAGNELVGLMRKNYNQLMRTKRYRKLLFLYGDSKDKDKRRTYAKQLNEMQKAYNITWEYCRTSMIPIGKKYGVDAVFALTKAEDIWRGIEKCLYGNGNAIHFSRYGEMPCIRAKQINRGIPIFVRDNKLQFKLGRMVFGIQINDRFQQDEVDAVLSYLAESEILDDRAVSILIKDGYCIDTYRPCYATLVPRMIRGKYRVYLHLTIEGKAKQKYDKHGNPRHKYGKGMIGADIGTQTVAYTSDTEVGLKNLSERGNSIQTSERKERLLYRAMDRSRRATNPQNYNDDGTVKKSRKTWKYSNRYKKLKEKHSELCRINAINRQLAINEDANHLRSLGDVFITEPKNAGRLMRRAKETTVNSKGKFNRKKRFGRSIKNRCPSGFQAAVEQKFKVSGGTYIEVSNDYRASQYDHTVDDYIKKRLSDRMYKLQDGTEVQRDWYSSFLLHCYDYRTKDIDKNKCISEFDKCYSKEKALIEWIKANEIKVLNSGIKIA

SEQ ID NO: 2618 - protein, 519 aa, Unknown
  Description of Unknown: uncultivated organism sequence
  Category: MG81 effectors
  Description: MG81-907 effector
MIQPELKAYRRCSDRHVLVLETNLTYVEKCQFFHYADLIRKAGNELTGIMKKRYDQLVRTKRYRKLKSLYKKYKDADNKKALKDVCDQMKKMQKQYDVTWDYCRTSMIPIGKKYGIDAVFALTKAEDVFRGIEKCLYSDGETIHFKKRGDLPCIRAKQLNRGIIMKQMNFKFKNIEFGAKIKDRYEQEEVDAILYYLKNTELMDSIAANTYKETNICVSTYRPCYVSLVCKKIRGKLRVYVHITIEGLSKPKQDRFGNFKHNKGKGVVGCDIGTQTIAYTTETKAGLKNLAERGSCIEVNERKERRIYRAMDRSRRAMNPDNYNEDGTIKKGKKTWVLSNRYKKLRTKHTELCRINATNRHLAINEDVNELRSLGDVFVTEPKNAKKLQKKAKTGKRKKRFGRSIKNRCPGYFQSQAKRKFRIYVEVPNDYKASQYDHTSDEYVKKSLSQRMYKLQDGTMVQRDLYSSFLLYCIDLNTNKIDKNKCIHEFEKQYKNQNETIEYIQMNQIKVMNSGIRVN

SEQ ID NO: 2619 - protein, 1140 aa, Unknown
  Description of Unknown: uncultivated organism sequence
  Category: MG81 effectors
  Description: MG81-908 effector
MKYVIGMDIGIGSIGWSVIRSDADCKRIEDFGVRIFEPGENASDRKSNSQIRREYRSVRRVLRRRKHRKELLKAHLENIGLTTIDRINEYFKHADGDIISLRVKGLDKKLAPEEIAACLINIANRRGYRPFYENEELSQYEKTSLNKTRQFMLSGEYRTSAEMILKNEQFDSEESEYRSYRNRSGNEETVLIERKWLRDEVEKILKKQSEFYPCLNDRNTNAIKRIIFDQRDFEDGPGDKNDPFRRYTGFLESMGQCRFYPDEKRGYRATLTADTYSLVNELSQYSYVDENGCFVFDSALAHDLIASALKNAKFTKSDFNKICKAHGIVPIYGGKGKDTDISRCFKFLKAIKPILEADGFDWETVCNIDTASDPDSILNRIGIIVSENITPARRKKALKNLNILNDDSITALCNYKFGGTSSVSYKYMSGAIEAFLNGDIYGKHQASHIEETATESVKHTKLPVFDKDFEFFKNPVVFRAINESRKVINAIIEKYGSPSAINIEVGSEVSRSFANRTADKNEQTKRMKEKDAAKKAIAELLGVDIASVTSKMIDRYFLGELQGWKCMYSGKEINKEECLRGSKTYEIDHIVPFSLILDNTLNNKALVLTSENQLKKQQTPLMYLSGERRKNFIGTVNELFRAKKIKKKKYAYLLQPDLNDEKMSEWKSRNLNDMRYISRFMVGYLKENLKFDNSSKSEGRWQNVYAVKGSLTSMFRKLWLNETTWGRADKASIKAETYLDHAVDAVVIGNCLPVYVEIAQVNLRLRDIYKSNGRQFVAEYWDCFNKGVEMISRYYNIDKDTVRAFLKKSDRIPSLIPDLREEVDRRFVDHAIYSKYQKEIADHEGKKFKEPTYEEAEQAYRTSMENLYPTDLQFAHSLSMPLISCKPERKFSGKITADNPVKLREIDGKLYTLSKKRIYSAADKDKIKRTDIEKIYTSDANLIAYLIELFDGAKDTATLRDIMKENGISEIRTKNGNAIRKLTLRNICDKDFLKKEIDENNHTYLDTAKYYCVELYKDIKDKLRVQGIKRADIIPQNGKLCLAPWYKQPDNYFKHVMYLQKNDYLKVYKNGKLSFCGYYRSAAGLTNSKVHFIIDNQPEDKEKYITLKLEVKKYPVDILGKIGKKEIKCGEPLSSAKVKK

SEQ ID NO: 2620 - protein, 1134 aa, Unknown
  Description of Unknown: uncultivated organism sequence
  Category: MG81 effectors
  Description: MG81-909 effector
MKYVIGMDIGIGSIGWSVIRSDADCKRIEDFGVRIFDPGENASDRKSNSQIRREYRSVRRVLRRRKHRKELLKAHLENIGLTTIDRINEYFKHADGDIISLRVKGLDKKLAPEEIAACLINIANRRGYRPFYENEELSQYEKTSLNKTRQFMLSGEYRTSAEMILKNEQFDSEESEYRSYRNRSGNEETVLIERKWLRDEVEKILKKQSEFYPCLNDRNTNAIKRIIFDQRDFEDGPGDKNDPFRRYTGFLESMGQCRFYPDEKRGYRATLTADTYSLVNELSQYSYVDENGCFVFDSALAHDLIASALKNAKFTKSDFNKICKAHGIVPIYGGKGKDTDISRCFKFLKAIKPILEADGFDWETVCNIDTASDPDSILNRIGIIVSENITPARRKKALKNLNILNDDSITALCNYKFGGTSSVSYKYMSGAIEAFLNGDIYGKHQASHIEETATESVKHTKLPVFDKDFEFFKNPVVFRAINESRKVINAIIEKYGSPSAINIEVGSEVSRSFANRTADKNEQTKRMKEKDAAKKAIAELLGVDIASVTSKMIDRYFLGELQGWKCMYSGKEINKEECLRGSKAYEIDHIVPFSLILDNTLNNKALVLTSENQLKKQQTPLMYLSGERRKNFIGTVNELFRAKKIKKKKYAYLLQPDLNDEKMSEWKSRNLNDMRHISRFMVGYLKENLKFDNSSKSEGRWQNVYAVKGSLTSMFRKLWLNETTWGRADKASIKAETYLDHAVDAVVIGNCLPVYVEIAQINLRLRDIYKSNGRQFVAEYWDCFNKGVEMISCYYNIDKDTVRAFLKKSDRIPSLIPDLREEVDRRFVDHAIYSKYQKEIADHEGKKFKEPTYEEAEQAYRVSMENLYPTDLQFAHSLSMPLISCKPERKYRGEITAANPVKLREIDGKLYTLSKKEIGKIERKDIEKIYTSDTQLIAYLIELFDGAKDTATLGDIMKEKGISEIRTKNGNAIRKLTLRNICNKDFLKKEIDENNHTYLDTAKYYCVELYKDIKNQLQVQGIKRADIILQNGKLCLAPWYKQPDDYFKHVMYLQKNDYLKVYKNGKLSFCGYYRSAAGLTNSRLYFIIDNQPEDKKKYITLKLEVKKYPVDILGKIGKKEIKCGEPLSSAKVKK

SEQ ID NO: 2621 - protein, 1134 aa, Unknown
  Description of Unknown: uncultivated organism sequence
  Category: MG81 effectors
  Description: MG81-910 effector
MKYVIGMDIGIGSIGWSVIRSDADCKRIEDFGVRIFDPGENASDRKSNSQIRREYRSVRRVLRRRKHRKELLKAHLENIGLTTIDRINEYFKHADGDIISLRVKGLDKKLAPEEIAACLINIANRRGYRPFYENEELSQYEKTSLNKTRQFMLSGEYRTSAEMILKNEQFDSEESEYRSYRNRSGNEEIVLIERKWLRDEVEKILKKQSEFYPCLNDRNTNAIKRIIFDQRDFEDGPGDKNDPFRRYTGFLESMGQCRFYPDEKRGYRATLTADTYSLVNELSQYSYVDENGCFVFDSALAHDLIASALKNAKFTKSDFNKICKAHGIVPIYGGKGKDTDISRCFKFLKAIKPILEADGFDWETVCNIDTASDPDSILNRIGIIVSENITPARRKKALKNLNILNDDSITALCNYKFGGTSSVSYKYMSGAIEAFLNGDIYGKHQASHIEETATESVKHTKLPVFDKDFEFFKNPVVFRAINESRKVINAIIEKYGSPSAINIEVGSEVSRSFANRTADKNEQTKRMKEKDAAKKAIAELLGVDIASVTSKMIDRYFLGELQGWKCMYSGKEINKEECLRGSKAYEIDHIVPFSLILDNTLNNKALVLTSENQLKKQQTPLMYLSGERRKNFIGTVNELFRAKKIKKKKYAYLLQPDLNDEKMSEWKSRNLNDMRHISRFMVGYLKENLKFDNSSKSEGRWQNVYAVKGSLTSMFRKLWLNETTWGRADKASIKAETYLDHAVDAVVIGNCLPVYVEIAQINLRLRDIYKSNGRQFVAEYWDCFNKGVEMISCYYNIDKDTVRAFLKKSDRIPSLIPDLREEVDRRFVDHAIYSKYQKEIADHEGKKFKEPTYEEAEQAYRVSMENLYPTDLQFAHSLSMPLISCKPERKYRGEITAANPVKLREIDGKLYTLSKKEIGKIERKDIEKIYTSDTQLIAYLIELFDGAKDTATLGDIMKEKGISEIRTKNGNAIRKLTLRNICNKDFLKKEIDENNHTYLDTAKYYCVDLYKDIKNQLQVQGIKRADIILQNGKLCLAPWYKQPDDYFKHVMYLQKNDYLKVYKNGKLSFCGYYRSAAGLTNSRLYFIIDNQPEDKKKYITLKLEVKKYPVDILGKIGKKEIKCGEPLSSAKVKK

SEQ ID NO: 2622 - protein, 1134 aa, Unknown
  Description of Unknown: uncultivated organism sequence
  Category: MG81 effectors
  Description: MG81-911 effector
MKYVIGMDIGIGSIGWSVIRSDADCKRIEDFGVRIFDPGENASDRKSNSQIRREYRSVRRVLRRRKHRKELLKAHLENIGLTTIDRINEYFKHADGDIISLRVKGLDKKLAPEEIAACLINIANRRGYRPFYENEELSQYEKTSLNKTRQFMLSGEYRTSAEMILKNEQFDSEESEYRSYRNRSGNEETVLIERKWLRDEVEKILKKQSEFYPCLNDRNTNAIKRIIFDQRDFEDGPGDKNDPFRRYTGFLESMGQCRFYPDEKRGYRATLTADTYSLVNELSQYSYVDENGCFVFDSALAHDLIASALKNAKFTKSDFNKICKAHGIVPIYGGKGKDTDISRCFKFLKTIKPILEADGFDWETVCNIDTASDPDSILNRIGIIVSENITPARRKKALKNLNILNDDSITALCNYKFGGTSSVSYKYMSGAIEAFLNGDIYGKHQASHIEETATESVKHTKLPVFDKDFEFFKNPVVFRAINESRKVINAIIEKYGSPSAINIEVGSEVSRSFANRTADKNEQTKRMKEKDAAKKAIAELLGVDIASVTSKMIDRYFLGELQGWKCLYSGKEINKEECLGGSKAYEIDHIVPFSLILDNTLNNKALVLTSENQLKKQRTPLMYLSGERRKNFIGTVNELFRAKKIKKKKYAYLLQPDLNDEKMSEWKSRNLNDMRYISRFMVGYLKENLKFDNSSKSEGRWQNVYAVKGSLTSMFRKLWLNETTWGRADKASIKAETYLDHAVDAVVIGNCLPVYVEIAQVNLRLRDIYKSNGRQFVAEYWDCFNKGVEMISRYYNIDKDTVRAFLKKSDRIPSLIPDLREEVDRRFVDHAIYSKYQKEIADHEGKDFEKPTYEEAEQAYRVSMENLYPTDLQFAHGLSMPLISCKPERKYRGEITAANPVKLREIDGKLYTLSKKEIGKIERKDIEKIYTSDTQLIAYLIELFDGAKDTATLGDIMKEKGISEIRTKNGNAIRKLTLRNICNKDFLKKEIDENNHTYLDTAKYYCVELYKDIKNQLQVQGIKRADIILQNGKLCLAPWYKQPDDYFKHVMYLQKNDYLKVYKNGKLSFCGYYRSAAGLTNSRLYFIIDNQPEDKKKYITLKLEVKKYSVDILGKIGKKEIKCGEPLSSAKVKK

SEQ ID NO: 2623 - protein, 991 aa, Unknown
  Description of Unknown: uncultivated organism sequence
  Category: MG81 effectors
  Description: MG81-912 effector
MKYVIGMDIGIGSIGWSVIRSDADCKRIEDFGVRIFDPGENASDRKSNSQIRREYRSVRRVLRRRKHRKELLKAHLENIGLTTIDRINEYFKHADGDIISLRVKGLDKKLAPEEIAACLINIANRRGYRPFYENEELSQYEKTSLNKTRQFMLSGEYRTSAEMILKNEQFDSEESEYRSYRNRSGNEEIVLIERKWLRDEVEKILKKQSEFYPCLNDRNTNAIKRIIFDQRDFEDGPGDKNDPFRRYTGFLESMGQCRFYPDEKRGYRATLTADTYSLVNELSQYSYVDENGCFVFDSALAHDLIASALKNAKFTKSDFNKICKAHGIVPIYGGKGKDTDISRCFKFLKAIKPILEADGFDWETVCNIDTASDPDSILNRIGIIVSENITPARRKKALKNLNILNDDSITALCNYKFGGTSSVSYKYMSGAIEAFLNGDIYGKHQASHIEETATESVKHTKLPVFDKDFEFFKNPVVFRAINESRKVINAIIEKYGSPSAINIEVGSEVSRSFANRTADKNEQIKRMKEKDAAKKTIAELLGVDIASVTSKMIDRYFLGELQGWKCLYSGKEINKEECLGGSKAYEIDHIVPFSLILDNTLNNKALVLTSENQLKKQRTPLMYLSGEQRKNFIGTVNELFRAKKIKKKKYAYLLQPDLNDEKMSEWKSRNLNDMRYISRFMVGYLKENLKFDNSSKLEGRWQNVYAVKGSLTSMFRKLWLNETTWGRADKASIKAETYLDHAVDAVVIGNCLPVYVEIAQVNLRLRDIYKSNGRQFVAEYWDCFNKGVEMISRYYNIDKDTVRAFLKKSDRIPSLIPDLREEVDRRFVDHAIYSKYQKEIADHEGKKFKEPTYEEAEQAYRVSMENLYPTDLQFAHGLSMPLISCKPERKYRGEITAANPVKLREIDGKLYTLSRKEIGKIERKDIEKIYTSDTQLIAYLIELFDGAKDTATLGDIMKEKKHLGNTNQERQRHSQTHFEKYMQQGFLKKRN

SEQ ID NO: 2624 - protein, 1312 aa, Unknown
  Description of Unknown: uncultivated organism sequence
  Category: MG81 effectors
  Description: MG81-913 effector
MKISKVNHVRTGTTVTQMQGEGIIYVNPSQNKNAKKDLTEHIKKLNEKAKVLYSPINPVNSITVSMDKNEKQDVNASAKAIKYLVNGILRKNENGIPDCDSLLSQIREKAREAHTSSINPDKLAEKIVDRCLRKKLCKKSEIAKALFAAILSSNKAERLNLLDKDEVKAFFDLAHEDYYKTEQLKEIEDSIVKKDVRVQVKEGMDGEKHLVLSSADNPKKHFYFDFIKEYTSKDNAGREEMLIRFRQLIILFYSGVKAYHLSIGSDVGAWTFGSSLPDVADNFNDEAAALITECQIQQAEKEKYGKKKNILSDKLKNCKYGTPEYRNLLGQETDCKTAIASCNSAIGNAQKKIKVLLADTICNNYRTAVKTEGLAEGDIFWIGYIQGIAEKLFEKKSSYTMYKMSTKYLYEVTFNEWLSFVALKVIDMGKAVYHFAMPDCSDICSGAEIRAGKVQPLFEDGITSFDYERIKAKETITREFAVHATYAAGIFSNAVADKEYRLHTETDEKGRTLNFEDPLQYKEKEWVQALVPDAKKKLLMFFGGQSGWDGTEIAAKSDLEVTSAFQEMINVIRNSNYHYAGSIVSPKEETITIMRGLFDKEFSELGRILREKYYSNNVPVYYGIGDIDKLMTFLYTGESKREAQIPSFGNIFKKKDIPDFVKKNIAGSLLAKYNVQELEKFRSALYFVLKEIYYYGFLKETNIKDRFLAFLNKSKNSAKNPDAYNSFQSRLKDLDADCSFGEICQMYMTDYNQQNQGNYKVKSQTQEEKDRKDDKGHKYEHFKMLLYVTIQGAFTDYLAEKKEIFSFLMAPDLKENFFGSNAAKGFISSWKADLFNETKKVLSEDAYVLSWYALAHLLSPKQLNHLQGDIKSYIQFVGEINAREKSVLGRERDTRLTDTTGDFEKILKVLEFVMNFVGKTSNVLTDYFADADDYAKHLYSYVSYAGKKEEKNNAALAAFCQKAITQKDITLTDKIGIYHDGINPIVNTNVVKAMMYGNETILSEAVSKVSGDLFHGDIVSYFRLKKELEKVFEKGECANREEQTKLREFQNLKNRVELYDIAVFTDIINDYMGELVNMAYLRERDLMYYQLGYHYLRQEYATVEEKYKTISEENICITSGALLYQIMAMYSYNLPIIYKGKEGTYKYSNGGKINKFVKNYCGENLEDYDNVYYSGLELFEQRSRHDELHQFRNDIDHLKYFISADKSILDMYSQVYNGFFSYDIKLKKSVSYIFTNILAKYFVTADIKLNAKQVDGKRAVKLSVSEMSSDSFSYKEKVKMRDGKERERAYYLPVRSEGFLKDTKKLVEYISK

SEQ ID NO: 2625 - protein, 537 aa, Unknown
  Description of Unknown: uncultivated organism sequence
  Category: MG81 effectors
  Description: MG81-914 effector
MISDKEYKKLLKQFHKLSDRHILVVETDMPSSDVQKVVILSDKIRKAGNELVGLMRKNYDQLMRTKKYRKLLKLYGSTNDKKKHRDLANQLNEMQKQYNVTWDHCRNAMIHIGKKYSIDAVFALTKAEDIWRGIEKCLYNNGKTIHFSKYGELPCIRAKQINRGISMSVKDNELKFKLKGNVFGIQVKDRFQTDEVCAVLEYLSRSEIINDKAINKFLDKAYCIDTYRPCYATLVPKFIRGKYRVYLHLTIEGKAKPKYDRFGNPRHKFGKGIIGADIGTQTVAYTSNTEVGLKNLSERGNSIQTSERRERLLYRAMDRSRRATDPQNYNDDGTVKKGRKTWKYSNHYKKLKAKHSELCRINAINRQLAINEDANHLRSLGDVFITEPKNASKLMKRTKDTTVNSKGKFHKKKRFGKSIKNRCPSGFQTTVERKFKVSGGIYIEVPNNYRASQYDHTADDYIKKKLSDRIYKLTDGTLVQRDWYSSFLLYCYDYRTKDIDKNKCISEFDKCYNKEKALIEWIKANKIKILNSGIKIS

SEQ ID NO: 2626 - protein, 1134 aa, Unknown
  Description of Unknown: uncultivated organism sequence
  Category: MG81 effectors
  Description: MG81-915 effector
MKYVIGMDIGIGSIGWSVIRSDADCKRIEDFGVRIFEPGENASDRKSNSQIRREYRSVRRVLRRRKHRKELLKAHLENICLTTIDRINEYFKHADGDIISLRVKGLDKKLAPEEIAACLINIANRRGYRPFYENEELSQYEKTSLNKTRQFMLSGEYRTSAEMILKNEQFDSEESEYRSYRNRSGNEETVLIERKWLRDEVEKILKKQSEFYPCLNDRNTNAIKRIIFDQRDFEDGPGDKNDPFRRYTGFLESMGQCRFYPDEKRGYRATLTADTYSLVNELSQYSYVDENGCFVFDSALAHDLIASALKNAKFTKSDFNKICKAHGIVPIYGGKGKDTDISRCFKFLKAIKPILEADGFDWETVCNIDTASDPDSILNRIGIIVSENITPARRKKALKNLNILNDDSITALCNYKFGGTSSVSYKYMSGAIEAFLNGDIYGKHQASHIEETATESVKHTKLPVFDKDFEFFKNPVVFRAINESRKVINAIIEKYGSPSAINIEVGSEVSRSFANRTADKSEQTKRMKEKDAAKKAIAELLGVDIASVTSKMIDRYFLGELQGWKCLYSGKEINKEECLRGSKAYEIDHIVPFSLILDNTLNNKALVLTSENQLKKQRTPLMYLSGEQRKNFIGTVNELFRAKKIKKKKYAYLLQPDLNDEKMSEWKSRNLNDMRHISRFMVGYLKENLKFDNSSKSEGRWQNVYAVKGSLTSMFRKLWLNETTWGRADKASIKAETYLDHAVDAVVIGNCLPVYVEIAQVNLRLRDIYKSNGRQFVAEYWDCFNKGVEMISRYYNIDKDTVRAFLKKSDRIPSLIPDLREEVDRRFVDHAIYSKYQKEIADHEGKKFKEPTYEEAEQAYRTSMENLYPTDLQFAHGLSMPLISCKPERKYRGEITAANPVKLREIDGKLYTLSKKEIGKIERKDIEKIYTSDTQLIAYLIELFDGAKDTATLGDIMKEKGISEIRTKNGNAIRKLTLRNICNKDFLKKEIDENNHTYLDTAKYYCVELYKDIKNQLQVQGIKRADIILQNGKLCLAPWYKQPDDYFKHVMYLQKNDYLKVYKNGKLSFCGYYRSAAGLTNSRLYFIIDNQPEDKKKYITLKLEVKKYPVDILGKIGKKEIKCGEPLSSAKVKK

SEQ ID NO: 2627 - protein, 1289 aa, Unknown
  Description of Unknown: uncultivated organism sequence
  Category: MG81 effectors
  Description: MG81-916 effector
MKISKVDHVKTGVSERPIEAGGMMYSYPDSKNDNIVLREHIKKLTNRTKNLYLAFVAPKTNGGKLSMAAECSGTFNFYIKNNILCPIDNRKSDEEILNGILNAGFMARAIRDGRNERNVSENDVNNTVNRCLRQSLRKKYFSGSDGIYIPDVMKKLCMAIYGKANYKSIISSIPENELKLLIAAIRADYTRENYIEKIANSIEKQNVPIQVSEDGRRIILSSAYNEKKSYIFDFLKKYASCDKAGQEEMLKNMRYLIVLFFFGREVAEDALNDTGFCAWSFGLTLKEYGEKVFSKEVYDLWNARENIPFSQKADIRNLGDRLKLEYSKALVEHYQGALSSDDLSDSDKKWIGYISDKAGKMFSDHNMSSYKFTCGYLCERTWEEWISFVAMKFVEIGKGAYNFTMSAMDEIAKGGPVSFGTVDERYKNGISSFDYERMAAKDHLSRNLATYVSFALNNLDSSARSLDVREKAEDILSSSNLELLTNAKTKVLRYFGGESSFENMPVKDMSAEDIVSDLVSYFKVTRNSCFHFVSGASEGVNSDLFRAVFDKECQNAGVILRKRFYSNNVAMFYSEKDISALMTEMYDSVRNNPAQIPSFNKVISRNEVRNFITQLIPVGNRAPLNNAETSELFKNSIYFVLKEIYYHDFLNEKNLMKRFWDEIDSLKAADEKEEKAHEAFAARVKTITSENDDFGLLCQEIMTEYNQQNNQKSKKASAKKDKETGEIKKIENNDVIYKHYVMLLYLGIRQAFYKFIEEKECYAFLKKPSIGKQPEEKDFIYGWSTDMHNGMDVSDPLIQSWYITSHFINQKQLNHLIGQFKNYITYLDSIENRAEQTGNRIRESSKDQLDLYMKLLAVLDFAKLNNSLVSNTLEDYFDDADEYAKYISGFIDFGGDTKEALQAFCNQKFKCGDATETLGKYYDGLNPIMERNIILASMFGNTAIASNVIDRVTEKEVKDFYKRKNKVADLLSRGVSSEDDLKAIRFYQNLKNRIELVDMLSITELTNELVSHLTGYAYLRERDLMYMQLGYHYVKLFYTDVVDMSNKFRVLNGDCNITDGAALYQIAAMYSYDLPLYVIDDEGRSIKPNKLQSIGSKVKVFAKEYCKDDYDVYKEGLNLFEDISGPKDGRHDEFIDIRKYIDHMKYFANQKKSILDMYSEMYGGFFSYNTKLKKSVSYVLPNILMADFIVARLGFEKGIKTVGEKEVSVPQMVVKEISTDYLTFKEIKSILANQGNEILKDPNKIVIGSGWKEEPSQNNKGRKSEGTFVAARSTKYCEAVGRLLVYKKE

SEQ ID NO: 2628 - protein, 1134 aa, Unknown
  Description of Unknown: uncultivated organism sequence
  Category: MG81 effectors
  Description: MG81-917 effector
MKYVIGMDIGIGSIGWSVIRSDADCKRIEDFGVRIFEPGENASDRKSNSQIRREYRSVRRVLRRRKHRKELLKAHLENIGLTTIDRINEYFKHADGDIISLRVKGLDKKLAPEEIAACLINIANRRGYRPFYENEELSQYEKTSLNKTRQFMLSGEYRTSAEMILKNEQFDSEESEYRSYRNRSGNEETVLIERKWLRDEVEKILKKQSEFYPCLNDRNTNAIKRIIFDQRDFEDGPGDKNDPFRRYTGFLESMGQCRFYPDEKRGYRATLTADTYSLVNELSQYSYVDENGCFVFDSALAHDLIASALKNAKFTKSDFNKICKAHGIVPIYGGKGKDTDISRCFKFLKAIKPILEADGFDWETVCNIDTASDPDSILNRIGIIVSENITPARRKKALKNLNILNDDSITALCNYKFGGTSSVSYKYMSGAIEAFLNGDIYGKHQASHIEETATESVKHTKLPVFDKDFEFFKNPVVFRAINESRKVINAIIEKYGSPSAINIEVGSEVSRSFANRTADKNEQTKRMKEKDAAKKAIAELLGVDIASVTSKMIDRYFLGELQGWKCMYSGKEINKEECLRGSKTYEIDHIVPFSLILDNTLNNKALVLTSENQLKKQQTPLMYLSGERRKNFIGTVNELFRAKKIKKKKYAYLLQPDLNDEKMSEWKSRNLNDMRYISRFMVGYLKENLKFDNSSKSEGRWQNVYAVKGSLTSMFRKLWLNETTWGRADKASIKAETYLDHAVDAVVIGNCLPVYVEIAQVNLRLRDIYKSNGRQFVAEYWDCFNKGVEMISRYYNIDKDTVRAFLKKSDRIPSLIPDLREEVDRRFVDHAIYSKYQKEIADHEGKKFKEPTYEEAEQAYRVSMENLYPTDLQFAHGLSMPLISCKPERKYRGEITAANPVKLREIDGKLYTLSRKEIGKIERKDIEKIYTSDTQLIAYLIELFDGAKDTATLGDIMKEKSISEIRTKNGNAIRKLTLRNICNKDFLKKEIDENNHTYLDTAKYYCVELYKDIKNQLQVQGIKRADIILQNGKLCLAPWYKQPDDYFKHVMYLQKNDYLKVYKNGKLSFCGYYRSAAGLTNSRLYFIIDNQPEDKKKYITLKLEVKKYSVDILGKIGKKEIKCGEPLSSAKVKK

SEQ ID NO: 2629 - protein, 1138 aa, Unknown
  Description of Unknown: uncultivated organism sequence
  Category: MG81 effectors
  Description: MG81-918 effector
MKYVIGMDIGIGSIGWSVIRSDADCKRIEDFGVRIFEPGENASDRKSNSQIRREYRSVRRVLRRRKHRKELLKAHLENIGLTTIDRINEYFKHADGDIISLRVKGLDKKLAPEEIAACLINIANRRGYRPFYENEELSQYEKTSLNKTRQFMLSGEYRTSAEMILKNEQFDSEESEYRSYRNRSGNEETVLIERKWLRDEVEKILKKQSEFYPCLNDRNTNAIKRIIFDQRDFEDGPGDKNDPFRRYTGFLESMGQCRFYPDEKRGYRATLTADTYSLVNELSQYSYVDENGCFVFDSALAHDLIASALKNAKFTKSDFNKICKAHGIVPIYGGKGKDTDISRCFKFLKAIKPILEADGFDWETVCNIDTASDPDSILNRIGIIVSENITPARRKKALKNLNILNDDSITALCNYKFGGTSSVSYKYMSGAIEAFLNGDIYGKHQASHIEETATESVKHTKLPVFDKDFEFFKNLVVFRAINESRKVINAIIEKYGSPSAINIEVGSEVSRSFANRTADKNEQTKRMKEKDAAKKAIAELLGVDIASVTSKMIDRYFLGELQGWKCMYSGKEINKEECLRGSKTYEIDHIVPFSLILDNTLNNKALVLTSENQLKKQQTPLMYLSGERRKNFIGTVNELFRAKKIKKKKYAYLLQPDLNDEKMSEWKSRNLNDMRYISRFMVGYLKENLKFDNSSKSEGRWQNVYAVKGSLTSMFRKLWLNETTWGRADKASIKAETYLDHAVDAVVIGNCLPVYVEIAQVNLRLRDIYKSNGRQFVAEYWDCFNKGVEMISRYYNIDKDTVRAFLKKSDRIPSLIPDLREEVDRRFVDHAIYSKYQKEVADHEGKDFKKPTYEEAEQAYRVSMENLYPTDLQFAHGLSMPLISCKPERKYRGKITADNPVKLREIDSKLYTLSKKEIGKIERKDIEKIYTSDTQLIAYLIELFDGAKDTATLGDIMKEKGISEIRTKNGNAIRKLTLRNICNKDFLKKEIDENNHTYLDTAKYYCVELYKDIKDKLRVQGIKRADIIPQNGKLCLAPWYKQPDGFFKHVMYLQKNDYLKVYENGELLFCGYYLSVEDIRNSKLYFIIDNQPGQNRKENCKSIHIKSEVKKYTVDILGKIGKKEIKCGEPLSSAKVKK

SEQ ID NO: 2630 - protein, 1134 aa, Unknown
  Description of Unknown: uncultivated organism sequence
  Category: MG81 effectors
  Description: MG81-919 effector
MKYVIGMDIGIGSIGWSVIRSDADCKRIEDFGVRIFDPGENASDRKSNSQIRREYRSVRRVLRRRKHRKELLKAHLENIGLTTIDRINEYFKHADGDIISLRVKGLDKKLAPEEIAACLINIANRRGYRPFYENEELSQYEKTSLNKTRQFMLSGEYRTSAEMILKNEQFDSEESEYRSYRNRSGNEEIVLIERKWLRDEVEKILKKQSEFYPCLNDRNTNAIKRIIFDQRDFEDGPGDKNDPFRRYTGFLESMGQCRFYPDEKRGYRATLTADTYSLVNELSQYSYVDENGCFVFDSALAHDLIASALKNAKFTKSDFNKICKAHGIVPIYGGKGKDTDISRCFKFLKAIKPILEADGFDWETVCNIDTASDPDSILNRIGIIVSENITPARRKKALKNLNILNDDSITALCNYKFGGTSSVSYKYMSGAIEAFLNGDIYGKHQASHIEETATESVKHTKLPVFDKDFEFFKNPVVFRAINESRKVINAIIEKYGSPSAINIEVGSEVSRSFANRTADKNEQTKRMKEKDAAKKAIAELLGVDIASVTSKMIDRYFLGELQGWKCMYSGKEINKEECLRGSKTYEIDHIVPFSLILDNTLNNKALVLTSENQLKKQQTPLMYLSGERRKNFIGTVNELFRAKKIKKKKYAYLLQPDLNDEKMSEWKSRNLNDMRHISRFMVGYLKENLKFDNSSKSEGRWQNVYAVKGSLTSMFRKLWLNETTWGRADKASIKAETYLDHAVDAVVIGNCLPVYVEIAQVNLRLRDIYKSNGRQFVAEYWDCFNKGVEMISRYYNIDKDTVRAFLKKSDRIPSLIPDLREEVDRRFVDHAIYSKYQKEIADHEGKKFKEPTYEEAEQAYRVSMENLYPTDLQFAHGLSMPLISCKPERKYRGEITAANPVKLREIDGKLYTLSRKEIGKIERKDIEKIYTSDTQLIAYLIELFDGAKDTATLGDIMKEKSISEIRTKNGNAIRKLTLRNICNKDFLKKEIDENNHTYLDTAKYYCVELYKDIKNQLQVQGIKRADIILQNGKLCLAPWYKQPDDYFKHVMYLQKNDYLKVYKNGKLSFCGYYRSAAGLTNSRLYFIIDNQPEDKKKYITLKLEVKKYSVDILGKIGKKEIKCGEPLSSAKVKK

SEQ ID NO: 2631 - protein, 566 aa, Unknown
  Description of Unknown: uncultivated organism sequence
  Category: MG81 effectors
  Description: MG81-920 effector
MGWKSKGRGGTLVDNEEKKEDGATCCLTLPLKLEKWQSDHLEKRFEIARQLYNTLVHAELKRIHRIERMPEYREIERLIEATTDKKEKWALKNQKKQFLRKNGINRNTFTTDMKRLYKHFNDNIGSNVAQHGIVSQVLTAFEKVYIENQSGEVHFKKPGDLRSVQGYSQKKSGGVEIMFREGKIIWTQQENDDRKKSPKYQQRKKRQNYKGVKGIAREFPVVFSKNNPYEAEMLTKHVKFVRILRKDGKTKPHWYAQLVLEGRPVTKYDPISGAPKHPVGHGVVGIDIGTRTLAYSNDKEVNLLELADRVQNIEQEKRRLQRKMDRSRRAMNPENYNSDGTFKRGVKLTRNKSKRYRRIQHQLAMIQHHQADIRKQQHNELANYLLTLGDCFFVENMSYCDLVHRANKTEISEKTGRYKRKKRFGKSIANKAPAMLITMLKQKCQSRGLKGVKEVDTHVRASQYNHQTDTCIEKALENRWNVMPDGERIQRDLYSAFLLQHCKQGLPEYNRKELKKEFGEELYRVFDREALQRDYPQFVAYHHMTIQRLSELPHTIPSMGIRRIIS

SEQ ID NO: 2632 - protein, 541 aa, Unknown
  Description of Unknown: uncultivated organism sequence
  Category: MG81 effectors
  Description: MG81-921 effector
MVQSTADAEAKSVMYRAYKFRLDPNNEQVKALYQAAGAARYTYNMMTAYNLEIKKNRDEFWYAHITEDSDEQYKKQVESQLKALEKAEPARYKPLCQYASFSTQKLTPAKHKHKEVSEAIAQGVLPNDAWGSEEHPKNPWLHEANQRVLVSGLQNSAKAWKNFWDSQTGRRKGAKVNLPRLKKRGISRDSFTVPAPEAMGGYGAPYKNDSEQYKRLKKKGKDAVIQDYRHVRLSYLGVLRTFNSTKPLAKAVNTGAKIKSYTVSRNADRWYVSFLVELSEPIARPATKKQRAAGGVGIDLGVKTLVTLSDESNPYIANLRPGQRAQRKLRKLQQKFARSQKGSNRRARLAAEIARLHHKVALRRKGYLDQVTKGLVTQYSAVACEDLNVSGMVHSAKGTVENPGKNVAAKSGLNRSILDASFGMFIRQLEYKSAWYGSVVLKVDKWFPSSRTCFNCGEVKSKLPLSERVYDCQYCGYSADRDLNAARNILEQAYKEKEDKQNPQFAPERGENSNGRGRGSTCSVESGETSRPADGSAGHRR

SEQ ID NO: 2633 - protein, 508 aa, Unknown
  Description of Unknown: uncultivated organism sequence
  Category: MG81 effectors
  Description: MG81-922 effector
MKRHLDQLLRTKKYRGLRKSYGKISKSIKSLQQIKELSNVQKRHLKDQKKNLQTVSDQMNEMQETYHVTWEYCRNTMKTLRLKYEQTSVIALSRAEDIWTAVSKVLYSDGERLHFKKRGDLPELRAKQFHKEIIGRVKNGFLEFRYGKVSLPVIRKETDLWLMNELEAVESYLKDPDFHDAYAINQMQQGEIVSTYRPCYASIVCKTIRGKLRVYLHLTVEGLPFSKRTNDGIIKHPYGNGPVGCDIGTQTIAYTSDHTVGLENLAERGNSICYVERWQRLVQRAMDRSRRAMNPDNYNDDGTIRKGKKTWIKSKRYQKLQLRYRELCRISAENRRLAIHEQVHKMRSLGDIFVTEAKNAKKLQKRANPENPLDKNGRPKRKKRFGRSIQNRCPGYFQAKVKQLFESTGGTYIEVPSDYRASQYDHTVDDYIKKKLSQRMYNLKDGTKVQRDWYSSFLLYCIDLITKTIDRQKCLATFETQLNKEHAMIEEIIHLKKHIMNSGIRVAV

SEQ ID NO: 2634 - protein, 1323 aa, Unknown
  Description of Unknown: uncultivated organism sequence
  Category: MG81 effectors
  Description: MG81-923 effector
MKVSKVDHTSAGVTSKKDITYNGLLYRNPPKKGVNEILKDAETDEKILENMENYITRLNNRASSLYSVFNPIGNEKSKDNKSAEKDLYRNISSCFRDFVQDIKSNSADTASRNLLNRSFRVNSDKETIDNFVARYLRKSLQKRVNGYELSEIIRNIIYLKANLYRKEDVPVKEVCILAEAIKEDITKERQIKKMAVSIVKQDVKIQTYLSDDGKVLLRHTFAKHSKKSALFRFLQKFTSADIEEQEEMIRELRALVVLFYCGPNAYKEAQGDGIGVWTFGKTASDVRVNFCEEACRLITEYQAELERVETEKKEKSSNVKPVNTDIYKEKIKKAIRYSIAGSYQEAARTLKETEGFEDKRLWLGLIEEYAERILLSNRRFMDPGTQNCEFLCKRTMQMLISYIAMKLVDLGKAVYHFAMPAQIDVTNGKPAEFGEVQPSFRDGITSFDYEWIKAEESLTRELSTYSVFAVRNFLNSISKKESDIIAVNLNDVESGNLKSNSVMRVLRYFGGKKEWQDTYIGEVSENELINALRKEIGAARNSTFHYAGTIDNGITDDDKLIISQIYEKEHGDIGRIRRKKYYSNNALMFYKKTDIDALMDYLYSAPKDHPAQIPAFSKILNKNKVYEFSKFIKGNPKKKISTAGKTEELKGCVFYMLKECYYYGFLPDSRSALFVREALEDIVKSAEDAGPAATDRRLEAAQNFKKRFYEISEKASLGQICQRIMTDFQLQNGGQKKVQSSKYAKKGVGEPIYQHFRMMLYDILRKAFWKYLNTLTETGEMNFMFMREPSYKPEFATEEEFCKNWNDHSYDDIREGMEEDSYLEAWFTAAHFIAPAQLNHLIGSFKKYEQFTSDIKFRAEGNGIECNSRWQNRIHQDEMHRLLRVLEFVQMTNGTFSKEISDYYGRDVDSAIEEYAEFVENFVDFSTKKMPNKHVALQTFCNIAVKSGSPNGRIGIYYDGEKPILNRNIVMADMYGNVSLISNCMKKVTEREIKVFYNDMNNLTEVFKRGVCQNEDEQKRLKAFQNNKNRVELLDVAIYTEIVNELYAQLVSWSYLRERDLMYYQLGVNYMKLFNGNSVPKDSFLRIIQGNGANITEGAVLYQLVAMNSFGWPLLCRDGSADKKANTTGQKVDSFFKDYCRKDASIYESCLMLFERLQSHDAIIKEIRNPIDHMYYFEKGKNGATKSILEMYGDIYDRFFDYDLKLKKSVSFVLQNILLDHFIIAHTVMNRQEEKYKYKNKDGQEKSYTGTKLAIRPNREQKKKVFDKTIRKMKEISIIHYGMESDVLTYKIKVDSMPVLVIVDARSRMFLDQMQRILEYSKT

SEQ ID NO: 2635 - protein, 1134 aa, Unknown
  Description of Unknown: uncultivated organism sequence
  Category: MG81 effectors
  Description: MG81-924 effector
MKYVIGMDIGIGSIGWSVIRSDADCKRIEDFGVRIFDPGENASDRKSNSQIRREYRSVRRVLRRRKHRKELLKAHLENIGLTTIDRINEYFKHADGDIISLRVKGLDKKLAPEEIAACLINIANRRGYRPFYENEELSQYEKTSLNKTRQFMLSGEYRTSAEMILKNEQFDSEESEYRSYRNRSGNEETVLIERKWLRDEVEKILKKQSEFYPCLNDRNTNAIKRIIFDQRDFEDGPGDKNDPFRRYTGFLESMGQCRFYPDEKRGYRATLTADTYSLVNELSQYSYVDKNGCFVFDSALAHDLIASALKNAKFTKSDFNKICKAHGIVPIYGGKGKDTDISRCFKFLKAIKPILEADGFDWETVCNIDTASDPDSILNRIGIIVSENITPARRKKALKNLNILNDDSITALCNYKFGGTSSVSYKYMSGAIEAFLNGDIYGKHQASHIEETATESVKHTKLPVFDKDFEFFKNPVVFRAINESKKVINAIIEKYGSPSAINIEVGSEVSRSFANRTADKNEQTKRMKEKDAAKKAIAELLGVDIANVTSKMIDRYFLGELQGWKCMYSGKEINKEECLRGSKAYEIDHIVPFSLILDNTLNNKALVLTSENQLKKQQTPLMYLSGERRKNFIGTVNELFRAKKIKKKKYAYLLQPDLNDEKMSEWKSRNLNDMRHISRFMVGYLKENLKFDNSSKLEGRWQNVYAVKGSLTSMFRKLWLNETTWGRADKASIKAETYLDHAVDAVVIGNCLPVYVEIAQVNLRLRDIYKSNGRQFVAEYWDCFNKGVEMISRYYNIDKDTVRAFLKKSDRIPSMIPDLREEVDRRFVDHAIYSKYQKEIADHEGKKFKEPTYEEAEQAYRTSMENLYPTDLQFAHSLSMPLISCKPERKFSGKITADNPVKLREIDGKLYTLSKKEIGKIERKDIEKIYTSDTQLIAYLIELFDGAKDTATLGDIMKEKGISEIRTKNGNAIRKLTLRNICNKDFLKKEIDENNHTYLDTAKYYCVELYKDIKNQLQVQGIKRADIILQNGKLCLAPWYKQPDDYFKHVMYLQKNDYLKVYKNGKLSFCGYYRSAAGLTNSRLYFIIDNQPEDKKKYITLKLEVKKYPVDILGKIGKKEIKCGEPLSSAKVKK

SEQ ID NO: 2636 - protein, 537 aa, Unknown
  Description of Unknown: uncultivated organism sequence
  Category: MG81 effectors
  Description: MG81-925 effector
MITDKEHKRHLKQFHKLSDRHILAVETDMSYSDVLKVVALSDKIRKAGNELIGIMRKNYNQLMRTKRYRKLLFLYGNSKDKNKRKTYAKQLNEMQKAYNITWEYCRTSMIPIGKKYGVDAVFALTKAEDIWRGMEKCLYGNGNILHFSRYGELPCIRAKQMNRGIRIFVKDNMLQFKLGRMVFGIQTNDRFQQDEVDAVLSYLAESEILNDRAVNTLIKDDYCIDTYRPCYATLVPKMIRGKYRVYLHLTIEGRAKPKYDRFGNPRHKYGKGMIGADIGTQTVAYTSDTEVGLKNLSERGNSIQTSERKERLLYRAMDRSRRATNPQNYNDDGTVKKGRKTWIYSNHYKKLKEKHSELCRINAINRQLAINEDANHLRSLGDLFITEPKNAGKLMRRAKETTVNCKGKFNRKKRFGKSIKNRCPSGFQAAVEQKFKVSGGIYIEVSNDYRASQYDHTIDEYIKKKLSDRMYKLQDGTEVQRDWYSSFLLYCYDYRTKDIDKNKCISEFDKCYNKEKALIEWIKVNEIKVLNSGIKIA

SEQ ID NO: 2637 - protein, 1138 aa, Unknown
  Description of Unknown: uncultivated organism sequence
  Category: MG81 effectors
  Description: MG81-926 effector
MKYVIGMDIGIGSIGWSVIRSDADCKRIEDFGVRIFDPGENASDRKSNSQIRREYRSVRRVLRRRKHRKELLKAHLENIGLTTIDRINEYFKHADGDIISLRVKGLDKKLAPEEIAACLINIANRRGYRPFYENEELSQYEKTSLNKTRQFMLSGEYRTSAEMILKNEQFDSEESEYRSYRNRSGSEETVLIERKWLRDEVEKILKKQSEFYPCLNDRNTNAIKRIIFDQRDFEDGPGDKNDPFRRYTGFLESMGQCRFYPDEKRGYRATLTADTYSLVNELSQYSYVDENGCFVFDSALAHDLIASALKNAKFTKSDFNKICKAHGIVPIYVGKGKDTDISRCFKFLKAIKPILEADGFDWETVCNIDTASDPDSILNRIGIIVSENITPARRKKALKNLNILNDDSITALCNYKFGGTSSVSYKYMSGAIEAFLNGDIYGKHQASHIEETATESVKHTKLPVFDKDFEFFKNPVVFRAINESRKVINAIIEKYGSPSAINIEVGSEVSRSFANRTADKSEQTKRMKEKDAAKKAIAELLGVDIASVTSKMIDRYFLGELQGWKCLYSGKEINKEECLRGSKAYEIDHIVPFSLILDNTLNNKALVLTSENQLKKQQTPLMYLSGERRKNFIGTVNELFRAKKIKKKKYAYLLQPDLNDEKMSEWKSRNLNDMRYISRFMVGYLKENLKFDNSSKSEGRWQNVYAVKGSLTSMFRKLWLNETTWGRADKASIKAETYLDHAVDAVVIGNCLPVYVEIAQVNLRLRDIYKSNGRQFVAEYWDCFNKGVEMISRYYNIDKDTVRAFLKKSDRIPSLIPDLREEVDRRFVDHAIYSKYQKEVADHEGKDFKKPTYEEAEQAYRVSMENLYPTDLQFAHGLSMPLISCKPERKYRGKITADNPVKLREIDSKLYTLSKKEIGKIERKDIEKIYTSDTQLIAYLIELFDGAKDTATLGDIMKEKGISEIRTKNGNAIRKLTLRNICNKDFLKKEIDENNHTYLDTAKYYCVELYKDIKDKLRVQGIKRADIIPQNGKLCLAPWYKQPDGFFKHVMYLQKNDYLKVYENGELLFCGYYLSVEDIRNSKLYFIIDNQPGQNRKENCKSIHIKSEVKKYTVDILGKIGKKEIKCGEPLSSAKVKK

SEQ ID NO: 2638 - protein, 1146 aa, Unknown
  Description of Unknown: uncultivated organism sequence
  Category: MG81 effectors
  Description: MG81-927 effector
MKYVIGMDIGIGSIGWSVIRSDADCKRIEDFGVRIFDPGENAGDRKRKSNSQIRREYRSVRRVLRRRKHRKELLKAHLENIGLTTIDRINEYFKHADGDIISLRVKGLDKKLAPEEIAACLINIANRRGYRPFYENEELSQYEKTSLNKTRQFMLSGEYRTSAEMILKNEQFDSEKSEYRSYRNRSGNEETVLIERKWLRDEVEKILKKQSEFYPCLNDRNTNAIKRIIFDQRDFEDGPGDKNDPFRRYTGFLESMGQCRFYPDEKRGYRATLTADTYSLVNELSQYSYVDENGCFVFDSALAHDLIASALKNAKFTKSDFNKICKAHGIVPIYGGKGKDTDISRCFKFLKAIKPILKADGFDWETVCNIDTASDPDSILNRIGIIVSENITPARRKKALKNLNILNDDSITALCNYKFGGTSSVSYKYMSGAIEAFLNGDIYGKHQASHIEETATESIKHTKLPVFDKDFEFFKNPVVFRAINESRKVINAIIEKYGSPSAINIEVGSEVSRSFANRTADKNEQTKRMKEKDAAKKAIAELLGVDIASVTSKMIDRYFLGELQGWKCLYSGKEINKEECLGGSKAYEIDHIVPFSLILDNTLNNKALVLTSENQLKKQQTPLMYLSGERRKNFIGTVNELFRAKKINKKKYAYLLQPDLNDEKMSEWKSRNLNDMRYISRFMVGYLKENLKFDNSSKSEGRWQNVYAVKGSLTSMFRKLWLNETTWGRADKASIKAETYLDHAVDAVVIGNCLPVYVEIAQVNLRLRDIYKSNGRQFVAEYWDCFNKGVEMISRYYNIDKDTIRAFLKKSDRIPSLIPDLREEVDRRFVDHAIYSKYQKEIADHEGKKFKEPTYEEAEQAYRVSMENLYPTDLQFAHGLSMPLISCKPERKYRGEITAANPVKLREIDGKLYTLSKKRIYSAADKDKIKRTDIEKIYTSDANLIAYLIELFDGAKDTATLRDIMKEKGISEIRTKNGNAIRKLTLRNICNKDFLKKEIDENNHTYLDTAKYYCVELYKDIKDKLRVQGIKRADIILQNGKLCLAPWYKQPDGYFKHVMYLQKNDYLKVYENGELLFCGYYLSVEDIGNSKLYFIIDNQPGQNKKENCKSIHIKSEVKKYTVDILGKIGKKEIKCGEPLSSAKVKK

SEQ ID NO: 2639 - protein, 974 aa, Unknown
  Description of Unknown: uncultivated organism sequence
  Category: MG81 effectors
  Description: MG81-928 effector
MQVHDDVILGLDIGVGSLGWALLEEDLQTGEQRLLQRQTPQGETTYALGVRLFHVPENAKTKELLNVKRRTARMQRRTTARRAQRMRRVRALLDSLGVPGVRDADAFHLGKGRGAQCDPWQLRREGLERRLEAREWAVVLLHIAKHRGFRSNSKTDRSGSDKEMGQVLQAVSNLQQEVEASGLTVGALLASRERRRNRADHTGAPRYDLCMLRSLQENEVDILFTRQRELGNPLAGEEVRCRYAELAFAQRPLAPVSHMVGPCAFLEGERRAPRFAPTAELFRYVQALCNMRLRQETGEETPLSEEQRQAACAVFGSVQSVTYKKLRQVLRLPAGCRFAGLSYGVTEKGNVQDPEKADVVMRTGKCCQGTACLRGILGDAYEALHEQRLDEADAARLAATGALSAPAAALLARGMAGLRLTDAVARIVSELNDLDQIRAVLALLPLAAPRIAALSQAAGEGKLGIFQGSARLSLRAMEAILPHMLACGEYAAACELAGFDPRAAQKTDVTDIRNPVVLRVFREVRRQFSAICREFGFLPGRVHVELLREVGKSGEERNRISRGLERRTKEKEAARKAVAQLLGKSPETVSAGEVQRYELWRQQDGKCAYYMLWRHAGGERAYGDAMPQGSIPPAWLADGVNAVQVDHILPRSRTFDNSFHNLCLCCHAANQAKGGRTPWEWLGAAQPQAWHDFEQWVQSLPLKGLKKRNYLLRDLNAEVQGRFHARNLTDSGYVARLTLRWLEGEYARHDVPMQDADGRTRRRFFARPGQVTDFLRRHWGVQALKKIDGQRSGDRHHALDALLVAACSEGMLQRMVRAFQREENGPERLHIPCPWQDFSATVGRALGSVFVSRGTRPHQGPPARGDPARHTRGTAARRGDAARAVRAQGRGQADGGRPGQDQGRRPLPGRGGGPAPLAECGQARGCPAPLGTWRHHPACARLRRRVQQRRGAATGIGTGPSQQRRHGAHGHLQP

SEQ ID NO: 2640 - protein, 1098 aa, Unknown
  Description of Unknown: uncultivated organism sequence
  Category: MG81 effectors
  Description: MG81-929 effector
MQVRDDVILGLDIGVGSLGWALLEEDLQTGEQRLLQRQAPQGETSYALGVRLFNVPENPKTKELLNVKRRTARMQRRTTARRAQRMRRVRALLDSLGVPGVRDADAFHLGKGRGAQYDPWQLRREGLERRLEAREWAVVLLHIAKHRGFRSNSKTDSSGSDKEMGQVLQAVSNLQQEVEASGLTVGALLASRERRRNRADHTGAPRYDLCMLRSLQEDEVNILFTRQRELGNPLAGEDIRCRYAELAFAQRPLAPVSHMVGPCAFLEGERRAPRFAPTAELFRYVQALCTMRLRQETGEETPLSEEQRQAACAVFGSVQSVTYKKLRQVLRLPAGCRFVGLSYGVTGKGKVQDPEKADVVMRTGKCCQGTACLRGILGDAYDALHEQRLDEADAARLAATDALSAPAAALLARGMAGLRLTDALVRIVSELNDLGQIRAILALLPLPAPRIAALSQAAGEGKLGFFQGTARLSLRAMEAILPHMLACGEYAAACELAGFDPRAAQKTDVTDIRNPVVLRVFREVRRQFSAICREFGFLPGRVHVELLREVGKSGEERNRISRGLERRTKEKEAARKAVAQLLGKSPEAVSAGEVQRYELWRQQDGKCAYYMLWRHAGGERAYGNAMPQGSIPPAWLADGVNAVQVDHILPRSRTFDNSFHNLCLCCHAANQAKGGRTPWEWLGAAQPQAWHDFEQWVQSLPLKGLKKRNYLLRDLSAEVQGRFHARNLTDSSYVARLTLRWLEEEYARHDVPMQDAEGRTRRRFFARPGQVTDFLRRHWGVQALKKIDGQRSGDRHHALDALLVAACSEGMLQRMVRAFQREENGPERLHIPCPWQDFSATVGRALGSVFVSRVERGRTKGPLHEETLRAIREERQPDGETRRVLYERKAVARLTAADLDRIKDAARCPDVVAALRRWLDAGKPGDDLPRSAHGDIIRHVRVRAGEFSSGVILQRGSGQAQAKNGGIVRTDIYSRDGKFYMVPVYAKDVADKRLPLRACVAHKDEKDWLELTEDYHFLFSLTPDCYVLTENRKGEVKEGYFEGPDRGSANISLSLAHDKKNTIRGIGIQNLKRFEKYRVDRFGRLSLVRREADPRGRP

SEQ ID NO: 2641 - protein, 1098 aa, Unknown
  Description of Unknown: uncultivated organism sequence
  Category: MG81 effectors
  Description: MG81-930 effector
MQVRDDVILGLDIGVGSLGWALLEEDLQTGEQRLLQRQAPQGETSYALGVRLFNVPENPKTKELLNVKRRTARMQRRTTARRAQRMRRVRALLDSLGVLGVRDADAFHLGKGRGAQCDPWQLRREGLERRLEAREWAVVLLHIAKHRGFRSNSKTDSSGSDKEMGQVLQAVSNLQQEVEASGLTVGALLASRERRRNRADHTGAPRYDLCMLRSLQEDEVNILFTRQRELGNPLAGEDIRCRYAELAFAQRPLAPVSHMVGPCAFLEGERRAPRFAPTAELFRYVQALCTMRLRQETGEETPLSEEQRQAACAVFGSVQSVTYKKLRQVLRLPAGCRFVGLSYGVTEKGKVQDPEKADVVMRTGKCCQGTACLRGILGDAYDALHEQRLDEADAARLAATDALSAPAAALLARGMAGLRLTDALVRIVSELNDLGQIRAILALLPLPAPRIAALSQAAGEGKLGFFQGTARLSLRAMEAILPHMQACGEYAAACELAGFDPRAAQKTDLTDIRNPVVLRVFREVRRQFSAICREFGFLPGRVHVELLREVGKSGEERNRISRGLERRTKEKEAARKAVAQLLGKSPEAVSAGEVQRYELWRQQDGKCAYYMLWRHAGGERAYGNAMPQGSIPPAWLADGVNAVQVDHILPRSRTFDNSFHNLCLCCHAANQAKGGRTPWEWLGAAQPQAWHDFEQWVQSLPLKGLKKRNYLLRDLSAEVQGRFHARNLTDSSYVARLTLRWLEEEYARHDVPMQDAEGRTRRRFFARPGQVTDFLRRHWGVQALKKIDGQRSGDRHHALDALLVAACSEGMLQRMVRAFQREENGPERLHIPCPWQDFSTTVGRALGSVFVSRVERGRTKGPLHEETLRAIREERQPDGETRRVLYERKAVARLTVADLDRIKDAARCPDVVAALRRWLDAGKPGDDLPRSAHGDIIRHVRVRAGEFSSGVILQRGSGQAQAKNGGIVRTDIYSRDGKFYMVPVYAKDVADKRLPLRACVAHKDEKDWLELTEDYHFLFSLTPDCYVLTENRKGEVKEGYFEGPDRGSANISLSLAHDKKNTIRGIGIQNLKRFEKYRVDRFGRLSLVRREADPRGRP

SEQ ID NO: 2642 - protein, 605 aa, Unknown
  Description of Unknown: uncultivated organism sequence
  Category: MG81 effectors
  Description: MG81-931 effector
MPDHINVFVDVPQTAAPCDVAGTFKDMSAIELFKAFPQLIQFYAGYCVLWSRGYFVSTVIKIILRSRKMITDKEHKRHLKQFHKFSDRHILAVETDMPYSDVLKVVALSDKIRKAGNELVGLMRKNYDQLMRTKRYRKLLFLYGNTKDKDKRKTYAKQLNEMQKAYNITWEYCRTSMIPIGKKYGVDAVFALTKAEDIWRGMEKCLYGNGNAIHFSKYGELPCIRAKQMNRGIPISVTDNKLHFKLGRMVFGIQTNDRFQQDEVDAVLSYLAESEILDDKAVNTLIKDGCCIDTYRPCYATLVPRMIRGKYRVYLHLTIEGKAKPKYDKHGNPRHKLGKGMIGADIGTQTVAYTSDTKVGLKNLSERGSSIQTSERKERLLYRAMDRSRRATNPQNYNDDGTVKKGRKTWIYSNHYKKLKTKYSELCRINAINRQLAINEDANHLRSLGDVFITEPKNAGKLMRRAKETTVNSKGKFNRKKRFGKSIKNRCPSGFQSAVEQKFKVSGGIYIEVSNDYRASQYDHTIDDYIKKKLSDRMYKLQDGTEVQRDWYSSFLLYCYDYRTKDIDKSKCISEFDKCYNKEKALIEWIKVNEIKVLNSGIKIA

SEQ ID NO: 2643 - protein, 501 aa, Unknown
  Description of Unknown: uncultivated organism sequence
  Category: MG81 effectors
  Description: MG81-932 effector
MNEGDGMPKEEKESCCVLQLRLYPEPWQVQIIETRFKVLEHLKNSLIALELRKLRNLERTRAYREIQEQIKLADDKSKIKLYAKRRKLLKDAGFSEFVFKDDITPMQKHFAAHIATHVAHRAASEVWRAFDKFLFGNGKMVHYVRRGTLRSASNQTAGTTMTLENGYFKWNGGRDQNSIAINIRVAKPTTYYEKEMLQKKAKYFRIVRKWGKIGYKYYLQITLAGLPAVKPRLIANEKKVGIDIGPSSIAIVSDKKVELRALADKVQNNHIEKCSLQRSMDRSRRNLNPQNYNEDGTIRRGIRLNWTFSKHYIEMRGKVRMLERKNVDIRKYQHTCLANEVILLGTDVYIEQMSFKGLQRRAKETTYREDGRPKRKKRFGKSIANRAPAMFVEILGRKLTTIVGTELNKVDTFKFRASQYDHTNGSYKKKLLKERWAQLSNGDRIQRDLYSAFLLKNSNADLNSTNVEQCNATYDAFKIMHDDCITKLKSEKKSCLPSFGV

SEQ ID NO: 2644 - protein, 567 aa, Unknown
  Description of Unknown: uncultivated organism sequence
  Category: MG81 effectors
  Description: MG81-933 effector
MTKRKKHQITEYEKCLREYHKASPRHVIVLETDLTEDEKRHLFHQADLLRQCGNELLGIMKRHLDQLLRTKKYRGLRKSYGKISKSIKSLQQIKELSNVQKRHLKDQKKNLQTVSDQMNEMQEEYHITWEYCRNTMKTLRLKYEQTSVIALSRAEDIWTAVSKVLYSDGERLHFKKRGDLSELRAKQFHKEIIGRVKNGSLEFRYGKVSLPVIRKETDLWLMDELEAVESYLKDPSFHDAYAIDQMKHGEIVSTYRPCYASIVCKTIRGKLRVYLHLTVEGLPFPKRTKDGVIKHLCGDGIVGCDIGTQTIAYTSDHVVGLENLAERGNSIRCVERQQRLVQRAMDRSRRAMNPDNYNADGTIRKGKKTWIKSKRYQKLQLSYRELCRVSAENRKLAIHEQVHKMRSLGDVFVTEAKNAKKLQKRANPEDPLNKNGKPKRKKRFGRSIQNRCPGYFQAKIQQLFESTGGTYIEVPSDYRASQYDHTVDDYIKKKLSQRMFNLKDGTKVQRDWYSSFLLYCIDLITKTIDRQKCLATFETQLNKEHAMIEEIIRLKKRIMNSGIRVAA

SEQ ID NO: 2645 - protein, 1098 aa, Unknown
  Description of Unknown: uncultivated organism sequence
  Category: MG81 effectors
  Description: MG81-934 effector
MQVHDDVILGLDIGVGSLGWALLEEDLQTGEQRLLQRQTPQGETTYALGVRLFHVPENAKTKELLNVKRRTARMQRRTTARRAQRMRRVRALLDSLGVPGVRDADAFHLGKGRGAQCDPWQLRREGLERRLEAREWAVVLLHIAKHRGFRSNSKTDRSGSDKEMGQVLQAVSNLQQEVEASGLTVGALLASRERRRNRADHTGAPRYDLCMLRSLQENEVDILFTRQRELGNPLAGEEVRCRYAELAFAQRPLAPVSHMVGPCAFLEGERRAPRFAPTAELFRYVQALCNMRLRQETGEETPLSEEQRQAACAVFGSVQSVTYKKLRQVLRLPAGCRFAGLSYGVTEKGNVQDPEKADVVMRTGKCCQGTACLRGILGDAYEALHEQRLDEADAARLAATGALSAPAAALLARGMAGLRLTDAVARIVSELNDLDQIRAVLALLPLAAPRIAALSQAAGEGKLGIFQGTARLSLRAMEAILPHMLACGEYAAACELAGFDPRAAQKTDVTDIRNPVVLRVFREVRRQFSAICREFGFLPGRVHVELLREVGKSGEERNRISRGLERRTKEKEAARKAVAQLLGKSPETVSAGEVQRYELWRQQDGKCAYYMLWRHAGGERAYGDAMPQGSIPPAWLADGVNAVQVDHILPRSRTFDNSFHNLCLCCHAANQAKGGRTPWEWLGAAQPQAWHDFEQWVQSLPLKGLKKRNYLLRDLNAEVQGRFHARNLTDSGYVARLTLRWLEEEYARHDVPMQDADGRTRRRFFARPGQVTDFLRRHWGVQALKKIDGQRSGDRHHALDALLVAACSEGMLQRMVRAFQREENGPERLHIPCPWQDFSATVGRALGSVFVSRVERGRTKGPLHEETLRAIREERQPDGETRRVLYERKAVARLTAADLDKIKDAARCPDVVAALRRWLDAGKPGDALPRSAHGDIIRHVRVCAGEFSSGVVLQRGSGQAQASNGGMVRTDIYSRDGKFYMVPVYAKDVADKRLPLRACVAHKDEKDWPEMTADYRFLFSLTPDCYVLTENRKGEIKEGYFSGADRSSANISLTLAHDRKSSIRGIGIQKLRRFEKYRVDRFGRLSPVRREADPRGRS

SEQ ID NO: 2646 - protein, 441 aa, Unknown
  Description of Unknown: uncultivated organism sequence
  Category: MG81 effectors
  Description: MG81-935 effector
MDADEYKKLLKKFHKLSDRHILVAETDMSYPDVQKVVNFSGRIRKAGNELVGVMKKNYEQLMRTKKYRKMLQLYGSTEDKNKRKTYAGQLNEMQEQYNVTWDFCRVSMIPIGKKYGIDAIFALAKAEDVWRGVEKCLYGNGRMLHFSRYGDFPCIRAKQINRGVPMSVKNDELKFKLGKLVFGIQVKDRFQTDEVNAVLDYLAQPEVIDNKAVKTLQDEACCISTYRPCYATLVPKFIRGKYRVYLHLVIEGKAKPKYDSSGNPRHKYGRGVVGADIGTQTIAYTSDTETGLKNLSERGNSIQKSERLERLYYRAMDRSRRATNPKNYNADGTIKKGKKKWTYSRHYKKLKAKHAELCCINATNRQLAINEDVNHLRCLGDTFVTEPKNAARLMKRSKDTTVNNKGKINRKKRFGKSVKNRCRAVSRLPWKISSKHPAVHT

SEQ ID NO: 2647 - protein, 1098 aa, Unknown
  Description of Unknown: uncultivated organism sequence
  Category: MG81 effectors
  Description: MG81-936 effector
MQVHDDVILGLDIGVGSLGWALLEEDLQTGEQRLLQRQTPQGETTYALGVRLFHVPENAKTKELLNVKRRTARMQRRTTARRAQRMRRVRALLDSLGVPGVRDADAFHLGKGRGAQCDPWQLRREGLERRLEAREWAVVLLHIAKHRGFRSNSKTDRSGSDKEMGQVLQAVSNLQQEVEASGLTVGALLASRERRRNRADHTGAPRYDLCMLRSLQENEVDILFTRQRELGNPLAGEEVRCRYAELAFAQRPLAPVSHMVGPCAFLEGERRAPRFAPTAELFRYVQALCNMRLRQETGEETPLSEEQRQAACAVFGSVQSVTYKKLRQVLRLPAGCRFAGLSYGVTEKGNVQDPEKADVVMRTGKCCQGTACLRGILGDAYEALHEQRLDEADAARLAATGALSAPAAALLARGMAGLRLTDAVARIVSELNDLDQIRAVLALLPLAAPRIAALSQAAGEGKLGIFQGSARLSLRAMEAILPHMLACGEYAAACELAGFDPRAAQKADVTDIRNPVVLRVFREVRRQFSAICREFGFLPGRVHVELLREVGKSGEERNRISRGLERRTKEKEAARKAVAQLLGKSPEAVSAGEVQRYELWRQQDGKCAYYMLWRHAGGERAYGNAMPQGSIPPAWLADGVNAVQVDHILPRSRTFDNSFHNLCLCCHAANQAKGGRTPWEWLGAAQPQAWHDFEQWVQSLPLKGLKKRNYLLRDLSAEVQGRFHARNLTDSSYVARLTLRWLEEEYARHDVPMQDAEGRTRRRFFARPGQVTDFLRRHWGVQALKKIDGQRSGDRHHALDALLVAACSEGMLQRMVRAFQREENGPERLHIPCPWQDFSATVGRALGSVFVSRVERGRTKGPLHEETLRAIREERQPDGETRRVLYERKAVARLTAADLDRIKDAARCPDVVAALRRWLDAGKPGDALPRSAHGDIIRHVRVCAGEFSSGVVLQRGSGQAQASNGGMVRTDIYSRDGKFYMVPVYAKDVADRRLPLRACVAAKAEKDWREMTADYRFLFSLTPDCYVLTENRKGEVKEGYFIGSDRSTAAISLSLAHDRQQSLRGIGITTLKRFEKYRVDRFGRLSSVRREADPRGRS

SEQ ID NO: 2648 - protein, 1098 aa, Unknown
  Description of Unknown: uncultivated organism sequence
  Category: MG81 effectors
  Description: MG81-937 effector
MQVRDDVILGLDIGVGSLGWALLEEDLQTGEQRLLQRQTPQGETTYALGVRLFHVPENAKTKELLNVKRRTARMQRRTTARRAQRMRRVRALLDSLGVPGVRDADAFHLGKGRGAQCDPWQLRREGLERRLEAREWAVVLLHIAKHRGFRSNSKTDRSGSDKEMGQVLQAVSNLQQEVEASGLTVGALLASRERRRNRADHTGAPRYDLCMLRSLQENEVDILFTRQRELGNPLAGEEVRCRYAELAFAQRPLAPVSHMVGPCAFLEGERRAPRFAPTAELFRYVQALCNMRLRQETGEETPLSEEQRQAACAVFGSVQSVTYKKLRQVLRLPAGCRFAGLSYGVTEKGNVQDPEKADVVMRTGKCCQGTACLRGILGDAYEALHEQRLDEADAARLAATGALSAPAAALLARGMAGLRLTDAVARIVSELNDLDQIRAVLALLPLAAPRIAALAQAAGEGKLGIFQGSARLSLRAMEAILPHMLACGEYAAACELAGFDPRAAQKTDVTDIRNPVVLRVFREVRRQFSAICREFGFLPGRVHVELLREVGKSGEERNRISRGLERRTKEKEAARKAVAQLLGKSPETVSAGEVQRYELWRQQDGKCAYYMLWRHAGGERAYGDAMPQGSIPPDWLADGVNAVQVDHILPRSRTFDNSFHNLCLCCHAANQAKGGRTPWEWLGAAQPQAWHDFEQWVQSLPLKGLKKRNYLLRDLNAEVQGRFHARNLTDSGYVARLTLRWLEEEYARHDVPMQDADGRTRRRFFARPGQVTDFLRRHWGVQALKKIDGQRSGDRHHALDALLVAACSEGMLQRMVRAFQREENGPERLHIPCPWQDFSATVGRALGSVFVSRVERGRTKGPLHEETLRAIREERQPDGETRRVLYERKAVARLTAADLDKIKDAARCPDVVAALRRWLDAGKPGDDLPRSAHGDIIRHVRVRAGEFSSGVILQRGSGQAQAKNGGIVRTDIYSRDGKFYMVPVYAKDVADKRLPLRACVAHKDEKDWLELTEDYHFLFSLTPDCYVLTENRKGEVKEGYFEGPDRGSANISLSLAHDKKNTIRGIGIQNLKRFEKYRVDRFGRLSLVRREADPRGRS

SEQ ID NO: 2649 - protein, 1098 aa, Unknown
  Description of Unknown: uncultivated organism sequence
  Category: MG81 effectors
  Description: MG81-938 effector
MQVHDDVILGLDIGVGSLGWALLEEDLQTGEQRLLQRQTPQGETTYALGVRLFHVPENAKTKELLNVKRRTARMQRRTTARRAQRMRRVRALLDSLGVPGVRDADAFHLGKGRGAQCDPWQLRREGLERRLEAREWAVVLLHIAKHRGFRSNSKTDRSGSDKEMGQVLQAVSNLQQEVEASGLTVGALLASRERRRNRADHTGAPRYDLCMLRSLQENEVDILFTRQRELGNPLAGEEVRCRYAELAFAQRPLAPVSHMVGPCAFLEGERRAPRFAPTAELFRYVQALCNMRLRQETGEETPLSEEQRQAACAVFGSVQSVTYKKLRQVLRLPAGCRFAGLSYGVTEKGNVQDPEKADVVMRTGKCCQGTACLRGILGDAYEALHEQRLDEADAARLAATGALSAPAAALLARGMAGLRLTDAVARIVSELNDLDQIRAVLALLPLAAPRIAALSQAAGEGKLGIFQGSARLSLRAMEAILPHMLACGEYAAACELAGFDPRAAQKTDVTDIRNPVVLRVFREVRRQFSAICREFGFLPGRVHVELLREVGKSGEERNRISRGLERRTKEKEAARKAVAQLLGKSPETVSAGEVQRYELWRQQDGKCAYYMLWRHAGGERAYGDAMPQGSIPPAWLADGVNAVQVDHILPRSRTFDNSFHNLCLCCHAANQAKGGRTPWEWLGAAQPQAWHDFEQWVQSLPLKGLKKRNYLLRDLNAEVQGRFHARNLTDSGYVARLTLRWLEEEYARHDVPMQDADGRTRRRFFARPGQVTDFLRRHWGVQALKKIDGQRSGDRHHALDALLVAACSEGMLQRMVRAFQREENGPERLHIPCPWQDFSATVGRALGSVFVSRVERGRTKGPLHEETLRAIREERQPDGETRRVLYERKAVARLTAADLDKIKDAARCPDVVAALRRWLDAGKPGDALPRSAHGDIIRHVRVCAGEFSSGVVLQRGSGQAQASNGGMVRTDIYSRDGKFYMVPVYAKDVADKRLPLRACVAHKDEKDWPEMTADYRFLFSLTPDCYVLTENRKGEIKEGYFSGADRSSANISLTLAHDRKSSIRGIGIQKLRRFEKYRVDRFGRLSPVRREADPRGRS

SEQ ID NO: 2650 - protein, 1098 aa, Unknown
  Description of Unknown: uncultivated organism sequence
  Category: MG81 effectors
  Description: MG81-939 effector
MQVHDDVILGLDIGVGSLGWALLEEDLQTGEQRLLQRQTPQGETTYALGVRLFHVPENAKTKELLNVKRRTARMQRRTTARRAQRMRRVRALLDSLGVPGVRDADAFHLGKGRGAQCDPWQLRREGLERRLEAREWAVVLLHIAKHRGFRSNSKTDRSGSDKEMGQVLQAVSNLQQEVEASGLTVGALLASRERRRNRADHTGAPRYDLCMLRSLQENEVDILFTRQRELGNPLAGEEVRCRYAELAFAQRPLAPVSHMVGPCAFLEGERRAPRFAPTAELFRYVQALCNMRLRQETGEETPLSEEQRQAACAVFGSVQSVTYKKLRQVLRLPAGCRFAGLSYGVTEKGNVQDPEKADVVMRTGKCCQGTACLRGILGDAYEALHEQRLDEADAARLAATGALSAPAAALLARGMAGLRLTDAVARIVSELNDLDQIRAVLALLPLAAPRIAALSQAAGEGKLGIFQGSARLSLRAMEAILPHMLACGEYAAACELAGFDPRAAQKTDVTDIRNPVVLRVFREVRRQLSAICREFGFLPGRVHVELLREVGKSGEERNRISRGLERRTKEKEAARKAVAQLLGKSPETVSAGEVQRYELWRQQDGKCAYYMLWRHAGGERAYGDAMPQGSIPPAWLADGVNAVQVDHILPRSRTFDNSFHNLCLCCHAANQAKGGRTPWEWLGAAQPQAWHDFEQWVQSLPLKGLKKRNYLLRDLNAEVQGRFHARNLTDSGYVARLTLRWLEEEYARHDVPMQDADGRTRRRFFARPGQVTDFLRRHWGVQALKKIDGQRSGDRHHALDALLVAACSEGMLQRMVRAFQREENGPERLHIPCPWQDFSATVGRALGSVFVSRVERGRTKGPLHEETLRAIREERQPDGETRRVLYERKAVARLTAADLDKIKDAARCPDVVAALRRWLDAGKPGDALPRSAHGDIIRHVRVCAGEFSSGVVLQRGSGQAQASNGGMVRTDIYSRDGKFYMVPVYAKDVADKRLPLRACVAHKDEKDWPEMTADYRFLFSLTPDCYVLTENRKGEIKEGYFSGADRSSANISLTLAHDRKSSIRGIGIQKLRRFEKYRVDRFGRLSPVRREADPRGRS

SEQ ID NO: 2651 - protein, 1132 aa, Unknown
  Description of Unknown: uncultivated organism sequence
  Category: MG81 effectors
  Description: MG81-940 effector
MKYVIGMDIGIGSIGWSVIRSDADCKRIEDFGVRIFDPGENASDRKSNSQIRREYRSVRRVLRRRKHRKELLKAHLENIGLTTIDRINEYFKHADGDIISLRVKGLDKKLAPEEIAACLINIANRRGYRPFYENEELSQYEKTSLNKTRQFMLSGEYRTSAEMILKNEQFDSEESEYRSYRNRSGNEETVLIERKWLRDEVEKILKKQSEFYPCLNDRNTNAIKRIIFDQRDFEDGPGDKNDPFRRYTGFLESMGQCRFYPDEKRGYRATLTADTYSLVNELSQYSYVDENGCFVFDSALAHDLIASALKNAKFTKSDFNKICKAHGIVPIYGGKGKDTDISRCFKFLKTIKPILEADGFDWETVCNIDTASDPDSILNRIGIIVSENITPARRKKALKNLNILNDDSITALCNYKFGGTSSVSYKYMSGAIEAFLNGDIYGKHQASHIEETATESVKHTKLPVFDKDFEFFKNPVVFRAINESRKVINAIIEKYGSPSAINIEVGSEVSRSFANRTADKNEQTKRMKEKDAAKKAIAELLGVDIASVTSKMIDRYFLGELQGWKCLYSGKEINKEECLGGSKAYEIDHIVPFSLILDNTLNNKALVLTSENQLKKQRTPLMYLSGERRKNFIGTVNELFRAKKKKKYAYLLQPDLNDEKMSEWKSRNLNDMRYISRFMVGYLKENLKFDNSSKSEGRWQNVYAVKGSLTSMFRKLWLNETTWGRADKASIKAETYLDHAVDAVVIGNCLPVYVEIAQVNLRLRDIYKSNGRQFVAEYWDCFNKGVEMISRYYNIDKDTVRAFLKKSDRIPSLIPDLREEVDRRFVDHAIYSKYQKEIADHEGKDFEKPTYEEAEQAYRVSMENLYPTDLQFAHGLSMPLISCKPERKYRGEITAANPVKLREIDGKLYTLSKKEIGKIERKDIEKIYTSDTQLIAYLIELFDGAKDTATLGDIMKEKGISEIRTKNGNAIRKLTLRNICNKDFLKKEIDENNHTYLDTAKYYCVELYKDIKNQLQVQGIKRADIILQNGKLCLAPWYKQPDDYFKHVMYLQKNDYLKVYKNGKLSFCGYYRSAAGLTNSRLYFIIDNQPEDKKKYITLKLEVKKYSVDILGKIGKKEIKCGEPLSSAKVKK

SEQ ID NO: 2652 - protein, 512 aa, Unknown
  Description of Unknown: uncultivated organism sequence
  Category: MG81 effectors
  Description: MG81-941 effector
MPTKQKEDSNRCVLTLPLLTEPWQEHIIEKRFKIIEHLKNQLISIELRKLKKLQRTKAYKNLIKQIESVPKSERTALYKERNKMLKDAGFSQYTFMDDMAGKKSLMQKHFESHINVQIAHKAAIDVWSSFEKFLFGTGQIVHYQKRGTLSSVASKSPKTGMFYYSDENIFKWSGGGTKPKGGIILCLRVASVKTNYEKEMVANNEIKYYRVVRKWMKTKYKYYLQITFAGKPADKHREISTGRVGIDIGTQTIAIASDKSVKLLELADKVNKNHIKKCELQRKLDRSRRYTNPDNFNPDGTVKRGTKGHKLKWNKSKHYIEIAGKIRELERKNADIRKYQHTCLANDILAMGNQIYIEPMNYKGLQKRAKETQVDEKGRYKKKKRFGKSLANKAPAMFVTILKTKAEQHGGEVYEVDIMSYQASQCDHTTGEYTKHGLNDRWRILGNGDKVQRDLYSAFLIKNSNKTHDEIDLDKCSKTYDNFKKLHDKEIENIRNEVILRKRRNISSYGIA

SEQ ID NO: 2653 - protein, 512 aa, Unknown
  Description of Unknown: uncultivated organism sequence
  Category: MG81 effectors
  Description: MG81-942 effector
MPTKQKEGGNRCVLTLPLLTEPWQEHIIEKRFKIIEHLKNQLISIELRKLKNLQRTKAYKNLIKQIESVPKSERTALYKERNKMLKDAGFSQYTFMDDMAGKKSLMQKHFESHINVQIAHKAAIDVWSSFEKFLFGTGQIVHYQKRGTLSSVASKSPKTGMFYYSDENIFKWSGGGTKPKGGIILCLRVASVKTNYEKEMVANNEIKYYRVVRKWMKTKYKYYLQITFAGKPADKHREISTGRVGIDIGTQTIAIASDKSVKLLELADKVNKNHIKKCELQRKLDRSRRYTNPDNFNPDGTVKRGTKGHKLKWNKSKHYLEIAGKIRELERKNADIRKYQHTCLANDILAMGNQIYIEPMNYKGLQKRVKETQVDEKGRYKKKKRFGKSLANKAPAMFVTILKTKVEQHGGEVYEVDIMSYRASQCDHTTGEYTKHGLNDRWRILGNGDKVQRDLYSAFLIKNSNKTHDEIDLDKCSKTYDNFKKLHDKEIENIRNEVKLRERRNISSYGIA

SEQ ID NO: 2654 - protein, 512 aa, Unknown; identical to SEQ ID NO: 1750
  Description of Unknown: uncultivated organism sequence
  Category: MG81 effectors
  Description: MG81-943 effector

SEQ ID NO: 2655 - protein, 622 aa, Unknown
  Description of Unknown: uncultivated organism sequence
  Category: MG82 effectors
  Description: MG82-1 effector
MAVVVHVYGVPPVLHGERVRLPAEVDEQLSLAHCLREDLVTLEHQRQDAVTAVWSSYPQIAAIETQLTAAETELTDRSAAAAAERSAARKKGPTESSEAVRQLKARIKDLRSQRRTAIADAHPTATPRLTAIADAHRAAIKALYADYSQGRGLYWATYNDVVAHHQVATKRVAAERKAGRPANIRHHRYDGSGSITVQLQRQTGAPPRLPATIADEQNGPWRNVLYLTPWVDPDTWATLARAEQRRRRLGVVRLDLGNKRHLSIPVLVHRMLPADADITSARLVVRRVAGHRKIELHVTARIKDPVTRSGGPAVALHLGWRREDGGAVRVATWRSTAPVHVPDDLNDLVHADTDHTGTISLPARWWHRVSTQPEMAARRATSLNDIRDQLVAALTDNPLTITADDEDAQPVPTAAAVATWRSPARFAHLARTWATDCPAGHQATAAALENWRRSDRRLWEQQAHGTANTLAARADAYRRTMSWLLTGASRLVLDNTAIADLARRADPATEPTLPTAVTDRVAHQRIGASPGQLRSIATTTANSYGVAVAVMPHTGITRTHYRCGHLNPADDRYSAARIVTCDGCGQHYDQESSATLMLLAASGDVAAPGSATARNPDTSAHA

SEQ ID NO: 2656 - protein, 629 aa, Unknown
  Description of Unknown: uncultivated organism sequence
  Category: MG82 effectors
  Description: MG82-2 effector
MSAAPQERRSARGPDVPQRRASTDPTILVAGEADASPEDSVTVHTMGVHYRWELPKVVRAQLRLAHDLREDLVTLQLDYEQDVRAIWSSYPDVAAAESELQRADDAVAAVNEHISAERVRLRSKKVGADLTKQLAAARAAVKAARQARRDAIAAVRDAAAQRLRARAAALLAGQKLLYRRYCQDNDLYWASYNDVFRHHKTALQRIRRQRLEGKPATLRHHRFDGTGTITVQLQRTAAMPARSPLLLSDPQGRYRNFLVLPWIDPDYWASLTRAQQRAAGRVVVRMRAGTVDGQPQWIDIPVQAHRWLPADAEILNARLTIDRVAARLSTRLNITARIGAPAAADGLAVAVHLGWRDSDRGTRVATWRSTQPLDVADELSDVMLTDDGLTGSIVLPPTISRRLERHAVTAAARAQSFNAVRDKLVSWLDEHGPMAYRDSDISAAEVRRWRSPARLAAVAIAWRDDHTRGEIVAVLEQWRSADRKIWDGQEHGRRRALGYRNDLYRQVGALLASQAARVVVDDINIAAIAGSRRARNDAPAGLQQLIDRRRFHAAPSRLRTAITAAAHRGGLRVDVVAAKGLSRVHAQCGHENPADDRYVSPPVTCEGCGMAYDPNESATLLMLRAVDAL

SEQ ID NO: 2657 - protein, 610 aa, Unknown
  Description of Unknown: uncultivated organism sequence
  Category: MG82 effectors
  Description: MG82-3 effector
MWCVVRVDRLRVTPGNAGFRLLGHARGTPGPSGSARRPGSVGPPVAGAMTAAETVVGAVTVHTMGVHYRWLLPEVLRAQLRLSHSLREDLVTLQLAYEADLRDIWSSYPLVTAAETVLRQAEQAAASATEQVKSERIRLRSKTVSAELTARLSEARDAVTAARQTRRDAIASVKDAAAHRRRDRTALLRADQKQLYRHYCQDDDLYWGTYNDVVHNHRTAVARIQRRRLDGKPAVLRHHRFDGTGTITVQLQRSAAMPPRRPELLCDPAGRYHNHLVLPWIDPRRWTEMSRSEQRRAGRVSVRMRAGSLDGQPQWIDIPVQAHRWLPADAEILTAKLAVTRVAARLSARLIITARIQPPATTPDGPTVAIRLGWRDSVHGTRVASWRSTQPLAIPGRLAHVIAADDRGLTGIITVPQSISQRLERHATTAAARDTALNAIRDKLTSWLHEHGPLPYRDGHLSADEVRRWRSPRPIRGLGHRLARRSPARRHRRRPRGVARRRPQTMGWARTRPPPSAGTPRRSLPPGRRPAHRTGRPGGGRRHQHLRHCPLAPRPRRRGGKSAAGHRPPPLSGRAGQTPRRHRRCGPAHQHSARGHLGQGAVANPCRLWP

SEQ ID NO: 2658 - protein, 390 aa, Unknown
  Description of Unknown: uncultivated organism sequence
  Category: MG83 effectors
  Description: MG83-1 effector
MARSRTYKFLLQPTSQQLAAFECLLRLQRELYNAALEERRGTWKWNQRSVSYFDQTKELTQLRSVRPDILSFGVTVCRGTLMRLDRAFNGFFRRCKSGESPGFPRFKGPGSFVSLQWLDTNGWALDETAGRLRLYGIGNVKAHLHRPIKGTPKTITIRREGRRYWVSIQCVDVPAEPLPATGKSIGIDLGVDFLVATSDGQLIQAPRFGKRGHAGLEKAQRDLATKIPGSKNREKAKQRVATHHRKIANRRRDFAHQTSRRLVNDHDLIVYEDLKITNMTRRPKARPDKQGGYEPNGAKAKTGLNRSIHDAGWGQFTAMTIYKAESAGREVIAVDPRNTSRTCSGCGHASAGNRHGAVFRCLGCGREANADINAAENILRAGRARQLIAA

SEQ ID NO: 2659 - protein, 583 aa, Unknown
  Description of Unknown: uncultivated organism sequence
  Category: MG83 effectors
  Description: MG83-2 effector
MKVVEFKLQLTDDQASKVDTWLNQLRWVWNEALRRVNEERQRYYRKQVNEDGTFGKVEDTGEVWQVWYNKEIKEKAYCCHIADKTRYADYAPCCEIRPYRHQQYANLKELKKWARNAATQKCNPDKPWLKDIPSCFSDFVARDLIKAWEQALSKTNPARYPRFKGNRDTLRSLTDENGHDHLRKDIRGKRNWLVKLNNKLGFMRIIGKHDRFPKDFTVVRICKRASGYYLQVTSKDLEDKTLKRNDRPVGIDVGLKFIVATDQGRVVEPKRYARVAERRLRLLQRKAARRRDAVQKLEGCKGKNLEKVNQQIALLHENIKYRRRQFNHKLSTKLVREYGAIAVEKLQLKNLMRRPEPKLKENGTGYARNNAAAKSGLNKSFADAGLGQLLEMLKTKAEAAGRLFKEVDPSYTSQECSNCHEQVKKSLSTRTHVCPSCGFVEDRDVNAAKNILEKANFSSDYRCWDKREVKPASASSVEGQQESDSGSLDLGKELRAEDALRLTQSQKNNDHLLVEVNSPSKEAVIPTGSGLDEVRLLQQMHVNSETSTPLASEAVIDQVKASTPKPKPRKVKRCLQNQPEAPT

SEQ ID NO: 2660 - protein, 427 aa, Unknown
  Description of Unknown: uncultivated organism sequence
  Category: MG84 effectors
  Description: MG84-1 effector
MNNKVSRYQLLFADEHNELKFKQFNEVMFQLQREMVQIANREVQILWEDMNWSNAVKAKTGVYPTKDEVLERYGSSVRTYIYRTIPQKYNNTSNTSTVLQNVNKRFTQNKKEVMQGKRSIDSYKSTLPIAIHGNSIKIEKIGNKYLVSLSLLSNGYKKQLGIKKGQIIFELMFGRSWSSRQIIDSILSGEFSHTASSITYKNRKWFLNLGYSYPEKEPIKFIDGRTMGIDLGIVKPLVIAFNDNPAHFEVDSDEISEFRKEIHSRRSSLGRQTKHCAESKIGHGVHKRTEGCEKLAQKEANFRDRINHQYSRYVVDLAQKYKCKTIQMEDLTGISKDSTFLKSWPYFDLQTKIEYKAKENGIDVIKINPKFTSQRCSKCGYISEANRPEQAIFQCKKCGFGINADWNAALNISIPGIEKIIKDSEVE

SEQ ID NO: 2661 - protein, 427 aa, Unknown
  Description of Unknown: uncultivated organism sequence
  Category: MG84 effectors
  Description: MG84-2 effector
MNNKVSRYQLLFDDEHNELKFKQFNEVMFQLQREMVQIANREVQILWEDMNWSNAVKAQTGAYPTKDGVLKHYGCPVRTYIYRTIPQEYNNTSNTSTVLQNVNKRFVQNKKEVMQGKRSIDSYKSTFPIAIHGNSIKIEKSGNKYIISLSLLSNGYKKQLGIKKGQITFELMFGRSWSSRQIIDSILSGEFSHTASSVIYKNRKWFLNLGYSFPEKEPIKFIDGRTMGIDLGIVKPLVIAFNDNPAHFEVDSDEISEFRKEIHSRRSSLGRQTKHCAESKIGHGVHKRTESCEKLAQKEANFRDRVNHQYSRYVVNLALKYKCKTIQMEDLTGISKDSTFLKSWPYFDLQTKIEYKAKENGIDVIKINPKFTSQRCSKCGYISEANRPEQAIFQCKKCGFGINADWNAALNISIPGIEKIIKDSEVE

SEQ ID NO: 2662 - protein, 427 aa, Unknown
  Description of Unknown: uncultivated organism sequence
  Category: MG84 effectors
  Description: MG84-3 effector
MNTKVSRYQLLFNDERNELKFKQFNEVMFQLQREMVQVANKATQILWEDMNWSNDVKVQTGSYPTKEEVTGRYGCSVRNFIYRTVPYEYNNTGNIATILQSVNKRFSQNKKEVIQGKRSIDSYKSTLPIAIHGNSIKIEKSGNKYLISLSLLSNGYRKQLGIKKGQIVFELMFGKSWSSKQIIDSIISGEFSHTASSIVYKNRKWFLNLGYSSPDKDSIKFIEGRTMGIDLGIVKPVVMAFNDNPVHFEIDSNEISEFRKQMIARRASIGKQTKYCADSKIGHGVHKRIEGIEKLKQTESNFRDRINHQYSRYIVDIAVKYKCKTIQMEDLSGISKDSTFLKSWPYFDLQTKIEYKAKENGIDVIKINPKFTSQRCSKCGYISEDNRPEQSVFLCKKCGFGLNADWNAALNIATPNIEEIIKNSDTE

SEQ ID NO: 2663 - protein, 431 aa, Unknown
  Description of Unknown: uncultivated organism sequence
  Category: MG84 effectors
  Description: MG84-4 effector
MNTTKVSRYQLLFDDEHNELSFQQANEVLFQLQREMMQIANRTVQLYWEFSGYQSDYKKRFDAYPDKEQLLEDLKYSNLRSYAYAVIAKEFYKNNTGNVATLLQNVDKRYKQNQKDVRLGKHSIDSYKATIPISLHRKSIQISKSKEDYDIRISLLSNVYRKELGVKSGQIYFKLITGKSYSSKQILESILSGKFHYTASSISYRKGKWFLNLGYNFESEELELRPSRVMGIDLGVVKPLVIAYNDTPVHQEIDSNEIQAFRDQMLARRRALGRQTKHCAESNIGHGVKTRTKALEKLKQTEANFRDRINHQYSRYVVDLAVKYKCKTIQMEDLSGISKDDIFLKNWPYYDLQTKIEYKAKEKGIDVVKINPKFTSQRCSKCGYISPENRPDQATFRCKNCGFSLNADWNAALNIAQPGIEEIIRETIKQK

SEQ ID NO: 2664 - protein, 431 aa, Unknown
  Description of Unknown: uncultivated organism sequence
  Category: MG84 effectors
  Description: MG84-5 effector
MNTTKVSRYQLLFDDEHNELSFQQANEVLFQLQREMMQIANRTVQLYWEFSGYQSDYKKRFDAYPDKEQLLEDLKYSNLRSYAYAVIAKEFYKNNTGNVATLLQNVDKRYKQNQKDVRLGKHSIDSYKTTIPISLHRKSIQISKSKEDYDIRISLLSNVYRKELGVKSGQIYFKLITGKSYSSKQILESILSGKFHYTASSISYRKGKWFLNLGYNFESEELELRPSRVMGIDLGVVKPLVIAYNDTPVHQEIDSNEIQAFRDQMLARRRALGRQTKHCAESNIGHGVKTRTKALEKLKQTEANFRDRINHQYSRYVVDLAVKYKCKTIQMEDLSGISKDDIFLKNWPYYDLQTKIEYKAKEKGIDVVKINPKFTSQRCSKCGYISPENRPDQATFQCKKCGFSLNADWNAARNIAQPGIEEIIRETIKQK

SEQ ID NO: 2665 - protein, 431 aa, Unknown
  Description of Unknown: uncultivated organism sequence
  Category: MG84 effectors
  Description: MG84-6 effector
MNTTKVSRYQLLFDDEHNELSFQQANEVLFQLQREMMQIANRTVQLYWEFSGYQSDYKKRFDAYPDKEQLLEDLKYSNLRSYTYAVIAKEFYKNNTGNVATLLQNVDKRYKQNQKDVRLGKRSIDSYKATIPISLHRKSIQISKSKEDYDIRISLLSNVYRKELGVKSGLIYFKLITGKSYSSKQILESILSGKFHYTASSISYRKGKWFLNLGYNFESEEPELRPSRVMGIDLGVVKPLVIAYNDTPVHQEIDSNEIQAFRDQMLARRRALGRQTKHCAESNIGHGVKTRTKALEKLKQTEANFRDRINHQYSRYVVDLAVKYKCKTIQMEDLSGISKDDIFLKNWPYYDLQTKIEYKAKEKGIDVVKINPKFTSQRCSKCGYISPENRPDQATFQCKKCGFSLNADWNAARNIAQPGIEEIIRETIKQK

SEQ ID NO: 2666 - protein, 431 aa, Unknown
  Description of Unknown: uncultivated organism sequence
  Category: MG84 effectors
  Description: MG84-7 effector
MNTTKVSRYQLLFDDEHNELSFQQANEVLFQLQREMMQIANRTVQLYWEFSGYQSDYKKRFDAYPDKEQLLEDLKYSNLRSYTYAVIAKEFYKNNTGNVSLLQQNVDKRYKQNRKDVQMGKRSIDSYKATIPIALQRKSILISKEGANFCVRISLLSNAYRKELGVKNGTLSFKLLFGKSYSAEQILEDIFAGKFKHTSSSISYRKGKWFLNLGYNFESEEPELRPSRVMGIDLGVVKPLVIAYNDTPVHQEIDSNEIQAFRNQMLARRRALGRQTKHCAESNIGHGVKTRTKALEKLKQTEANFRDRINHQYSRYVVDLAVKYKCKTIQMEDLSGISKDDIFLKNWPYYDLQTKIEYKAKEKGIDVVKINPKFTSQRCSKCGYISPENRPDQATFRCKKCSFTLNADWNAALNIAQPGIEEIIRETIKQK

SEQ ID NO: 2667 - protein, 431 aa, Unknown
  Description of Unknown: uncultivated organism sequence
  Category: MG84 effectors
  Description: MG84-8 effector
MNTTKVSRYQLLFDDEHNELSFQQANEVLFQLQREMMQIANRTVQLYWEFSGYQSDYKKRFDAYPDKEQLLEDLKYSNLRSYTYAVIAKEFYKNNTGNVSLLQQNVDKRYKQNRKDVQMGKRSIDSYKATIPIALQRKSILISKEGANFCVRISLLSNAYRKELGVKNGTLSFKLLFGKSYSAEQILEDIFAGKFKHTSSSISYRKGKWFLNLGYNFESEEPELRPSRVMGIDLGVVKPLVIAYNDTPVHQEIDSNEIQAFRNQMLARRRALGRQTKHCAESNIGHGVKTRTKALEKLKQTEANFRDRINHQYSRYVVDLAVKYKCKTIQMEDLSGISKDDIFLKNWPYYDLQTKIEYKAKEKGIDVVKINPKFTSQRCSKCGYISPENRPDQATFRCKKCSFTLNADWNAARNIAQPGIEEIIRETIKQK

SEQ ID NO: 2668 - protein, 431 aa, Unknown
  Description of Unknown: uncultivated organism sequence
  Category: MG84 effectors
  Description: MG84-9 effector
MNTTKVSRYQLLFDDEHNELSFRQANEVLFQLQREMMQIANRTVQLYWEFSGYQSDYKKRFDVYPDKEQLLEDLKYSNLRSYTYAVIAKEFYKNNTGNVSLLQQNVDKRYKQNRKDVQMGKRSIDSYKATVPIALQRKSILISKEGANFCVRISLLSNAYRKELGVKNGTLSFKLLFGKSYSAEQILEDIFAGKFKHTSSSISYRKGKWFLNLGYNFESEEPELRPSRVMGIDLGVVKPLVIAYNDTPVHQEIDSNEIQAFRNQMLARRRALGRQTKHCAESNIGHGVKTRTKALEKLKQTEANFRDRINHQYSRYVVDLAVKYKCKTIQMEDLSGISKDDIFLKNWPYYDLQTKIEYKAKEKGIDVVKINPKFTSQRCSKCGYISPENRPDQATFRCKKCSFTLNADWNAALNIAQPGIEEIIRETIKQK

SEQ ID NO: 2669 - protein, 431 aa, Unknown
  Description of Unknown: uncultivated organism sequence
  Category: MG84 effectors
  Description: MG84-10 effector
MNTTKVSRYQLLFDDEHNELSFRQANEVLFQLQREMMQIANRTVQLYWEFSGYQSDYKKRFDVYPDKEQLLEDLKYSNLRSYTYAVIAKEFYKNNTGNVSLLQQNVDKRYKQNRKDVQMGKRSIDSYKATVPIALQRKSILISKEGANFCVRISLLSNAYRKELGVKNGTLSFKLLFGKSYSAEQILEDIFAGKFKHTSSSISYRKGKWFLNLGYNFESEEPELRPSRVMGIDLGVVKPLVIAYNDTPVHQEIDSNEIQAFRNQMLARRRALGRQTKHCAESNIGHGVKTRTKALEKLKQTEANFRDRINHQYSRYVVDLAVKYKCKTIQMEDLSGISKDDIFLKNWPYYDLQTKIEYKAKEKGIDVVKINPKFTSQRCSKCGYISPENRPDQATFRCKKCSFTLNADWNAARNIAQPGIEEIIRETIKQK

SEQ ID NO: 2670 - protein, 438 aa, Unknown
  Description of Unknown: uncultivated organism sequence
  Category: MG84 effectors
  Description: MG84-11 effector
MNTTKVSRYQLLFDDENNELTFKQSNEVLFQLQKEMMQMANRMVQLYWEFSGYQSDYKKQFDAYPDKEKLLEDLKYSNIRSYIYDVLSKEFNKNNTGNVATLQQLVDKRYKQNRKEVQQGKRSIDSYKATIPISLHKGSIRLLKENGDYYAWLSLLSNEYKKELGIKKGRMRFKLLMGKSYSSMQILDSILSGEFHHTSSSLGYRNGKWFLSLGYQFEAKEPKLRESRVMGIDLGVVKPLVIAYNDMPLHHEIDSNEIQVFRDQMHARRRALGRQTKYCAESNIGHGVKTRTKALEKLKQAEANFRDRINHQYSRYVVNLAVKYGCKTIQMEDLTGISKKDTFLKNWPYYDLQTKIEYKARENGIDVVKINPRFTSQRCSKCGFISPENRPDQATFQCKKCGFGINADRNAATNIAQPGIEKIIQETIKQMSAKGKSS

SEQ ID NO: 2671 - protein, 438 aa, Unknown
  Description of Unknown: uncultivated organism sequence
  Category: MG84 effectors
  Description: MG84-12 effector
MNTTKVSRYQLLFDDENNELTFKQSNEVLFQLQKEMMQMANRMVQLYWEFSGYQSDYKKQFDAYPDKEKLLEDLKYSNIRSYIYDVLSKEFNKNNTGNVATLQQLVDKRYKQNRKEVQQGKRSIDSYKATIPISLHKGSIRLLKENGDYYVWLSLLSNEYKKELGIKKGRMRFKLLMGKSYSSMQILDSILSGEFHHTSSSLGYRNGKWFLNLGYQFEAKEPKLRESRVMGIDLGVVKPLVIAYNDMPLHHEIDSNEIQVFRDQMHARRRALGRQTKYCAESNIGHGVKTRTKALEKLKQAEANFRDRINHQYSRYVVNLAVKYGCKTIQMEDLTGISKEDTFLKNWPYYDLQTKIEYKARENGIDVVKINPRFTSQRCSKCGFISPENRPDQETVRCKKCGFGINADWNAATNIAQPGIEKIIQETIKQMSAKGKSS

SEQ ID NO: 2672 - protein, 438 aa, Unknown
  Description of Unknown: uncultivated organism sequence
  Category: MG84 effectors
  Description: MG84-13 effector
MNTTKVSRYQLLFDDENNELTFKQSNEVLFQLQKEMMQMANRMVQLYWEFSGYQSDYKKQFDAYPDKEKLLEDLKYSNIRSYVYDVLSKEFNKNNTANVSALQQLVDKRYKQNRKEVQQGKRSIDSYKATIPISLHKGSIRLLKENGDYYIWLSLLSNEYKKELGIKIGRMRFKLLMGESYSSMQILDSILSGEFHHTSSSLGYRDGKWSLNLGYQFEAKEPKLRESRVMGIDLGVVKPLVIAYNDMPPHHEIDSNEIQAFRDQMHARRRALGRQTKYCAESNIGHGVKTRTKALEKLKQAEANFRDRINHQYSRYVVNLAVKYGCKTIQMEDLTGISKKDTFLKNWPYYDLQTKIEYKARENGIDVVKINPRFTSQRCSKCGFISPENRPDQATFQCKKCGFGINADRNAATNIAQPGIEKIIQETIKQMSAKGKSS

SEQ ID NO: 2673 - protein, 438 aa, Unknown
  Description of Unknown: uncultivated organism sequence
  Category: MG84 effectors
  Description: MG84-14 effector
MNTTKVSRYQLLFDDENNELTFKQSNEVLFQLQKEMMQMANRMVQLYWEFSGYQSDYKKQFDAYPDKEKLLEDLKYSNIRSYVYDVLSKEFNKNNTGNVSALQQLVDKRYKQNWKEVQQGKRSLDSYKATIPISLHRKNIQLLKENGDYYVWLSLLSNEYKKELGIKKGRMRFKLLMGESYSSMQILDSILSGEFHHTSSSLGYRNGKWFLNLGYQFEAKEPKLRESRVMGIDLGVVKPLVIAYNDMPLHHEIDSNEIQVFRDQMHARRRALGRQTKYCAESNIGHGVKTRTKALEKLKQAEANFRDRINHQYSRYVVNLAVKYGCKTIQMEDLTGISKEDTFLKNWPYYDLQTKIEYKARENGIDVVKINPRFTSQRCSKCGFISPENRPDQETFQCKKCGFGINADWNAATNIAQPGIEKIIQETIKQMSAKGKSS

SEQ ID NO: 2674 - protein, 437 aa, Unknown
  Description of Unknown: uncultivated organism sequence
  Category: MG84 effectors
  Description: MG84-15 effector
MSNILSMPVKVMRYQIVKPVDADWELLGKVLRDLQDDTRKVLNKVIQLCWEWQGFSAEYKQQYGIYPKTSDFSHYKNIDGYCYKKISDFFTRLHTGNLSMTIKRGVQRWKTDLAEVIKGSKSIASFRSNCPIDIHNKSINIFNVEKEYYAKLSLLSKTYKKELSRDLGQITVLINPGDKSGKDILDRCISGEYKISSSQILQKKDTNTSKNNKWLLNLSYSFKSQKKIVDSNKVLGIDMGIIFPVYMAIHGTLIRDKIDGGEIEHFRKEVENRKIKLQRQGKYCGQGRIGHGTKTRVRPIEFAKEKIANFRNTVNHKYSRYIVDFALRNRCGIIQMEKLEGINKDKTFLKSWPYYDLQQKIIYKANEAGITGKFIDPRYTSQRCSKCGYIDEENRPEQKTFICKSCGFETNADYNAALNIANPDIENLIKKELSREA

SEQ ID NO: 2675 - protein, 437 aa, Unknown
  Description of Unknown: uncultivated organism sequence
  Category: MG84 effectors
  Description: MG84-16 effector
MSNILSMPVKVMRYQIVKPVDADWELLGKVLRDLQDDTRKVLNKVIQLCWEWQGFSAEYKQQYGIYPKTSDFSHYKNIDGYCYKKISDFFTRLHTGNLSMTIKRGVQRWKTDLAEVIKGSKSIASFRSNCPIDIHNKSINIFNVEKEYYAKLSLLSKTYKKELSRDLGQITVLINPGDKSGKDILDRCISGEYKISSSQILQKKDTNTSKNNKWLLNLSYSFKSQKKIVDSNKVLGIDMGIIFPVYMAIHGTLIRDKIDGGEIEHFRKEVENRKIKLQRQGKYCGQGRIGHGTKTRVRPIEFAKEKIANFRNTVNHKYSRYIVDFALRNRCGIIQMEKLEGINKDKTFLKSWPYYDLQQKIIYKANEAGITVKFIDPRYTSQRCSKCGYIDEENRPEQKTFICKSCGFETNADYNAALNIADPDIENLIKKELSREA

SEQ ID NO: 2676 - protein, 377 aa, Unknown
  Description of Unknown: uncultivated organism sequence
  Category: MG84 effectors
  Description: MG84-17 effector
NWSNAVRAKTGVYPTKDEVLERYGSSVRTYIYRTIPQEYNNTSNTSTVLQNVNKHFTQNKKEVMQGKRSVDSYKSTLPIALHGNSIKIEKSGNKYLISLSLLSNGYKKQLGVKRGQITFELMFGRSWSSRQIVDSILSGEFSHTASSIIYKNRKWFLNLGYSYPEKEPIKFIDGRTMGIDLGIVKPLVIAFNDNPAHFEVDSDEISEFRKEIHSRRSSLGRQTKHCAESKIGHGVHKRIEGCEKLAQKEANFRDRVNYQYSRYVVDLALKYKCKTIQMEDLTGISKDSTFLKSWPYFDLQTKIEYKAKENGIDVIKINPKFTSQRCSKCGYISEANRPEQAIFQCKKCGFGINADWNAALNISIPGIEKIIKDSKVE

SEQ ID NO: 2677 - protein, 398 aa, Unknown
  Description of Unknown: uncultivated organism sequence
  Category: MG84 effectors
  Description: MG84-18 effector
REMMQIANRTVQLYWEFSGYQSDYKKRFDAYPDKEQLLEDLKYSNLRSYTYAVIAKEFYKNNTGNVATLLQNVDKRYKQNQKDVRLGKRSIDSYKATIPISLHRKSIQISKSKEDYDIRISLLSNVYRKELGVKSGLIYFKLITGKSYSSKQILESILSGEFHYTASSISYRKGKWFLNLGYNFESEEPELRPSRVMGIDLGVVKPLVIAYNDTPVHQEIDSNEIQAFRNQMLDRRRALGRQTKHCAESNIGHGVKTRTKALEKLKQTEANFRDRINHQYSRYVVDLAVKYKCKTIQMEDLSGISKDDIFLKNWPYYDLQTKIEYKAKEKGIDVVKINPKFTSQRCSKCGYISPENRPDQATFQCKKCGFSLNADWNAALNIAQPGIEEIIRETIKQK

SEQ ID NO: 2678 - protein, 640 aa, Unknown
  Description of Unknown: uncultivated organism sequence
  Category: MG85 effectors
  Description: MG85-1 effector
MCTIKCMSQITIQCRFISSESTRHRIWELMAEKNTPLINELLEQVGQHPEFETWRQKGKLPSGIVSKLCQPLKKEERFIGQPSRLYISAIHVVDYIYKSWLALQLRLQRKLEGQTRWLEMLKSDSELIEVTGCSLDAIRTRAAEILAQSASQSDPVTRQQTQDKKKKKFKAKNSNTSLSNTLFEIYRNTEDILTRSYISYLLKNGCKVSDKEEDAEKFAKRRRKVEIRVERLQEQLKSRMPKGRDLTSDHWLETLVIATHNVPKNEDEAKSWQASLLRKSSSVPFPLVYETNTDLTWFKNQKGRICVNFSGLSEHTFEIYCDSRQLHWFKRFLEDQQIKHDSKNQHSSSLFTLRSARLNWQEGEGKGEPWNVHRLTFYCTVDTRLWTNEGTEQVREEKAFEIARTLTRMKEKGDINKNQQAFVKRKHSTLARINNPYPRPSQPLYKGQSHILVGVSLGLDKPATVAVVDATTGEVFTYQSIRQLLGDNYKLLNRERKQQQSKSHQRHKAQKSAAPNSFGESELGQYVDRLLAKAIVAIAQTYQASSIVLPKIGDMREIVQSEIQARAEAKCSVIEGQKKYAKQYRCSVHKWSYGRLIESIQSQAAKTGIAIEEGQQPIRGSPQEQARELAIIAYKSRKLL

SEQ ID NO: 2679 - protein, 467 aa, Unknown
  Description of Unknown: uncultivated organism sequence
  Category: MG85 effectors
  Description: MG85-2 effector
MFPSFCSPPFLSYFSTPLNGYNRCAISYLLKNGCKINDKEENPEKFAQRRRKLEIQIQRLTEKLAARIPKGRDLTDTQWLEALFTATQTVPENETEAKFWQNSLLKKSSSVPFPVAYETNEDLVWVKNQFGRICIKFSGLSEHTFQIYCDSRQLHWFQRLLEDQKIKKNSKNQHSSALFTLRSGRISWQEGEDKGDPWNVHHLTLYCSVDTRLWTEEGTNLVKEEKAEEIAKTITQTQAKGDLNDNQQAHIKRKNSSLARINNPFPRPSQPLYQGQSHILVGVSLGLENPATIAIVDGTTSKVLTYRNIKQILGDNYKLLNKQRQQKHLLSHQRHIAQRMAASNEFGDSELGEYIDRLLAKEIIAIAQTYKAGSIVLPKLGDMREQVQSEIKAKAEQKSDLVEVQQKYAKQYRVSVHQWSYGRLIANIQCQANKAGIVIEEAKQPIRGSPQEKAKELAINAYQSRKA

SEQ ID NO: 2680 - protein, 641 aa, Unknown
  Description of Unknown: uncultivated organism sequence
  Category: MG85 effectors
  Description: MG85-3 effector
MSVITIQCRLVAKEFSLRYLWELMAQKNTPLVNELLQAIVQHSDFESWLQKGSIPQATIKALCDSLKNDPRFSGQPGCFYTSATSLVSYNYKSWFALQKRRQQKIEGKERWLNLLKSERELEEECDRTLEEIRAKATQILTQFQPQAENAETPPGEATQKKKGKKSKSTPSKGKAASLFNTLFNAYAQTKDPLERCALAYLLKNNGEVSLVEEDLEAYQQRRRKKEIEIERLKEQLKSRHPKGRDLTAEKWLETLEAARTQQPESEAEAATWQANLLRNSSPVPFPVNYETNEDLTWFKNEAGRICVFFSGLREHHFEVWCDNRQLHWFERFFQDQQIKRQSKNQHSSSLFTLRSGRIGWQECTGEGEAWNIHHLKLYCTLDTRLWTAEGTEQVAQEKAAEISNILTKTKQKDDLNEKQLAFIKRGETMLARINTPFPRPSKPLYQGQSEIVVGVSLGLEKPATVAVIDVPGDRVLAYRNVKQLLGDHYPLLNRRRQQQRSLSQKRQKAQKQGAANEFGESELGQYIDRLLAKEIVAIARSYQAGSIALPKLTDIREILHSEMQTRVEKKIPGYKEAQDKYAKQYRVNVHRWSYGRLMDAIASQAAKVGIVIEVGKHPSEGSFQDKAREVAISAYCDRSVN

SEQ ID NO: 2681 - protein, 669 aa, Unknown
  Description of Unknown: uncultivated organism sequence
  Category: MG90 effectors
  Description: MG90-1 effector
MLVAKFGVRKFLTGESLALAEMRAAAQYYQSLVTIERWRRSQFAAIRSETVPGLGEIDEAYQQLDEWIGEHAGKGGKRGGIREKRRKATAATGRPVKPVKKAVDVSDEVDLITELKAWRKAAAELAKPMRGQFAAVVEPAQQEFTARSARLRSAWGSNDGDRHAKRRSDIQARDEMLAEAQWPEAWRRLAQLETQADALRGWIKEARLLSVGTYHSIQRVDLPAACKRPKPRPDGEPRRPKRRPTYSRRRLRRIGWEINDATWGDLLAGKNNELRITDVRNQGGANGGRVKQRATVHMRVRAETREALAAAPDYYRPKYDGPAGNWWVTMDVVLHRPIPPDTKVRWAYLVPSEESPGRWEYSLQFTLDPTEPLIQRAPGTGTVNVRLCWTQDNENKTLIVAHVNGEPLRLPGGAHERGRRAGVVESLRFAERLRSVADTLFDSARAEVAKRIASQPTRVFEAAHGLSQWRAHWKLKRVSAVMLEVLDKREEEYAMWKRWRDLRRAAHEDLFEPDIGKYAAILGLTTPDTIFTFWLAMWRRKDEHLEAMAAGARNHAMGRRRDFYRVTAAKLCTQFEICEVSGAVDLDQIALRDKAEDKPNELHQAARHNRQLACVHELKAALKAAFGPDRYKERDQSGAAKKAAAARDAANDVETNANTDEGPTVSAAE

SEQ ID NO: 2682 - protein, 716 aa, Unknown
  Description of Unknown: uncultivated organism sequence
  Category: MG90 effectors
  Description: MG90-2 effector
MSVDDPPLRSRARVLVYSYFCKPATEADEHALCEQLRLAALYRRELVQIENLARALQRAWSATYAESALEEERRRFRRMPPAEPDPVDPDAGSRWAEISAAARAWSDGATAREAGVRSLVALGVSEGLAQATVDQAKIASERSRAFNSVRRHFSQDLGLTWGTYQHAAEAFESQHRSVSMFDDVRVPPRAAVGCFAVHLQPARALRGSDDAWIRFGSIARLGSDRARGAEIDRSGRPRPARHHQVMLRIGTQADRRPRWVTVLALLDRPVPPTAIVSWAKVCRRRVGPTHRWELQITTQVDEACLVLDPSLAERAVRLWAAGVGKRGIARTLTMRIQDARRCALAALRAGISQGAGALDGQVQEATAALAHPPVPEPARSRGETVGVDIGWRRMGDAMRIARWWGTDGRSGELTIRRQVLDADVKADDLRGIRDQHKNEILAQLLDYTVSLRERSPRIPDADWIVAELPSMRQWRRAARLVGLVGRWRDHRIPGDDSIFEAVLGWLKQDRHLWAWEANQRQKRQRRVDEQIRLFVVWLCRQYGRIGVEAPMVAGLVRKVPRCVACASSPTRCTACSDRERLRRLTSTRVTHAAPARTRQLLETIAPTHGSVVIRLDPAYTTLDCALQDEAGLVCGHRRVEVVDWSPLEIACARCSGTEDQDLTAAKNLARRASGVALDEDGRPLATDSAGRSKASKRKLRPRRNRSGRRVDRSHPT

SEQ ID NO: 2683 - protein, 605 aa, Unknown
  Description of Unknown: uncultivated organism sequence
  Category: MG90 effectors
  Description: MG90-3 effector
MYAQKYGAKKPLEWTERHEQSFLDRRALWNDLVEVYRQARVRERELYSAADPEIESGYAEVDALDLALDAQPRQTDEERAAWRDILAQLKSTRAALWTKIRELKLGAEIKAQIRTIWQETQRATYTLACGKARKYPALHWADCNDLHDSLWKSIRAKKHPRPRTFTSRESLYRQLQSQTVGGVRVEVPDRKRRKIEGGTLTGATWDALTSERGYGGVKIQPYTLRRATRRWALLEFSIDSGATLRIPIRVHREPPKEALIKGVRVVRERIPGRRFPYEWSVVLSVAAEPLRSVIRCPSERTLYAGLGWRHTPEGLRVLAGIDDLGREWHVTLPEEYVLQWRYSRSLEAHLRLLRNAEAARLGVDPRSTRELFEHPDSRRWAYGEHLGEQTHAALLARNCEAAAAAEIFGERAGRARFSGLRSTLLRRRKDLYIRVARQIVGSSTRLVLGALDGADIQERTKDLPLPARHLRTIAAPTRLRDEIEWQARKAGVEVVTLDATNASRYCAVHPDVDLYAGRDESRLWLACEGCGVPLDRDANYARNLFRRDAPERFERCDWQALTRERSRLEIPNITHEVQRHWSTPQPRESRVQYTARLALANRDNC

SEQ ID NO: 2684 - protein, 445 aa, Unknown
  Description of Unknown: uncultivated organism sequence
  Category: MG90 effectors
  Description: MG90-5 effector
MTDAPATVTRTISLEVAKPLNCSWDELRVLLRTQRCIIPQLLRSGMDALIACGVVETKAVHGHVCPDARGTSPATVVYQSMKAELDRIQHGKWRDAARPALNLPAGMLSALARRVTQTYKLRPSFKGHQPIPVRRAELHVEADGDAVVVRVLLMGGGTGPRGGHRLLVRASEGFHWSIARRLAKGELAYGAGSLVFSERKDKWFVRIAYEAPVRVVQGADPSVALVVRRGVHTALMLMGTDGSYRRVPGEKVNAQLHALEARMRAARQIGADELGRGARGHGKRRRYAHYDALHGKRRRVVRTWCQQMGAAVVRQATRIGAGKVVIENFGGFAPDKSVAFIGSRFPFYQLKQSILEACEKRAIAVDEVAADYVSTTCPSCSVADARSHNRRTGTFHCLACGLSRPADFVAALNMLRRADVDSSTWDERMDQYKRLVESLKEQAAE

SEQ ID NO: 2685 - protein, 516 aa, Unknown
  Description of Unknown: uncultivated organism sequence
  Category: MG90 effectors
  Description: MG90-6 effector
METATEENHVDRVYQFGCRPPPGAEHEIALQLLGQAYLYRDDLRRAYNTQKRHVRMLLESKDAASHAIQFEHEMLKERIRSARASRGHLLDAGTYWLIEKAMLAASKANKLDPIRAQEWDGTGRIGAAIQSSAQFPAAAWNHSRVKLSKEDAQQFNTRKGPGSRSHDEDAVLTIFVGEAKAERALHWPVKLHRDFPSGAIVKQVAVQRTRSGHRFRWKVLITISHERSNERDPEAKGVVGLDVGWRTEGDLGMRVATHDASDDADALRIHTPEALFYADAVDSTRDMLFNEAKEYAFSSGLPGTEHARLWRDKERMRRLARSTQDLGAVWWHERDRHLRDISCAVRLRSIRRRLDAFRSYADSLAKRYRMIALEDMPMIDWVGKGKTAALERLRSIASLSLLQNIIAERFGAERVDWVPAAHTSMVCSSCKVQRELTVGPGPHWVCAACGHEHHQDYNAATNLRLLSEQWIADGKSLRARKRKSKKGNEKKHVNAIATGDALGMTVTARKSIATAA

SEQ ID NO: 2686 - protein, 645 aa, Unknown
  Description of Unknown: uncultivated organism sequence
  Category: MG90 effectors
  Description: MG90-7 effector
MYAQRYGAKAPLEWTEAHARVLLLADQLWDDLRAIWIQCLHEQEMAEDATGDAELLSARGAVSRTEAQVDAAFQARRDWRQRHRSKQAPEEIEASIKAAISAAREARRELWPVLKRVRKEIREELLDLWNARDQQMRVLAQGRTRKYTDLHDGVYNDIFKRFRVAAKEGAKQGIVPRPSHEHLSQSIYRQIQPHNFGGKLVSDPKKPGKRRKRIGGSQKGAEWSTLCTTGCGKVRVLPYSPGPRVTQRWGLLVMPVDANGLEIKIPIRVDDREPPQGAQIKGVRVVRRDRKWHTVFSVDAPPPSIERGAGTLYAGLNWRLMADGSLRVLDGIDETGKRYQVCLPRWQLAAVEYAEALQAATDRRAVQAALQLEADHPKRAKEIAEAVRRRNWAALYPLDTAWADGTHGKQGRRQHTALLRARKIAGGDLAKLTELVAEILGDRAGRRRIAGQKSKNTRRRESFYRECAQAIATRFGRLVVAKSDGRKLAKRVDEETGEESNLPAPARRNRQIAAPYSLMQYLRWAFVRAGSPVVDLEAKHKSHTCPICGQEMQGEASRGELYLSCSEHGMWDRDHALAAALWRDDAAGDHERWSLALSRRERPRAKIVRIDEEIGGSFTEHYHRLQYVSGGALEDKGKSRGATRR

SEQ ID NO: 2687 - protein, 482 aa, Unknown
  Description of Unknown: uncultivated organism sequence
  Category: MG90 effectors
  Description: MG90-9 effector
MKRDSNSPAERSRKAKAAKLARWKAAHPSVSRGLLYRMDPTVELGAGMGRMTDLDRALWNMTHQWWLMSSRPLRRVKKSDLDAVVAQARTDIPWLAELPAQACKAVAKRYWQTWERCWSGVGGAPNFHSRLKDRPSFDIPQARDLNITRVSKKFATVQVPKVGKVTIRYHRPIPVGARVTGARVTNDHGRWTLALRVELPKPELRSPVESRPVVGFDRGVVIPLAGSDGTEFNHPDWLTPGEKRHLRYLERQSARERHARWDRSDGRGKGRIGANERKTYDAIASVQAKAARRRKDWHHQTSRKIADGYSVAVFEALRIKNMTKSAAGSVKAPGTNVAAKSGLNRVILNEGWGTLLDLTRYKMADNGGAVVTVPAPFTSLTCHTCGSTTPGQRKNQALLVCGDTDCGWTGNADFNAACNILMRAVSGGLVPTLSAGIVDDARSRYELEERTDAMPPVGTEAPLKLDGPGKRENRLGQRTVAA

SEQ ID NO: 2688 - protein, 394 aa, Unknown
  Description of Unknown: uncultivated organism sequence
  Category: MG90 effectors
  Description: MG90-10 effector
MEEGSADKGHVTIVYPAYPNVDQERELLRTLGVVRGLYNHFLAESIADIMEGDRFPTPREMNKAITVMRGRDIGLVSVAVFTLRDAPLRVHAAMTSFARLSARSGELRLPRFKSESRYRSLAFDPKGVKFDGRRIVFGKWMKLRCGNLDRNRKLHRPEGGRIVTARIVRKGSGRWYVHITFEVDRRYRSEIDLSDPAEPEAYDLGLCDIITDSKGERIGAPDLYARHENEIARLQRQIASMEDGPKRRKKQRRLSVLHERIRRRRDGYLDEVADRMVSGHSAVILEDLRLRRMIERDNSPAPRRKLFTEAALGTLVRKVEAKAERACIPLVKVDPAYTTRRCSCCGHVGEKMPLSLRVFSCPRCGLEMDRDHNAALNILGSGMGTLRGSAEPSG

SEQ ID NO: 2689 - protein, 391 aa, Unknown
  Description of Unknown: uncultivated organism sequence
  Category: MG90 effectors
  Description: MG90-11 effector
MRRGGGSEDKWFVTRVYPAYPNRTQERELLRQLDVARGVYNHFAEACIHCLIDGTHVPDPMEMNREFTLMRADDCLLRSVNSYTLRETINRVWQAVEKCERRSLADGELHVPRIKTPPRFRSICFDPKSSKIENSRIRLNRELSVRCRNLARPRNGRAVAVRAVRRGTGRWYICITYETDRVVRGEMDVGEPDRAEGYDLGLVDLITDSRGNRVRAPDFFREGEAELAHLRRQLSRLEEGTAKWLKKRRRIARIEERIRRRRDGCLDRIADWMVSGKSVVVVEDIDVRRLASREDGTLVRRKRFTEAAWATLVGKAERKARKTDVRLIRVNPAYTTRTCSRCGHVGDGIPLSERMFRCPVCGLEMDRDRNAARNILGSGMGTQRCTAEPSG

SEQ ID NO: 2690 - protein, 430 aa, Unknown
  Description of Unknown: uncultivated organism sequence
  Category: MG90 effectors
  Description: MG90-12 effector
MSTITFEPPTCAFCGKKAEPNETFCHGNGNIYICTECVDEFHESINAANTFIENARKIQETDNMQKSRLPTPSQLKAHLDEYIIGQDYAKRVISVAVYNHYKMLKIKGQEKAGKTEKTVDLEKSNVLLLGPSGSGKTAIVRAIAKKLKVPFTMTDATLYSAAGYVGMDVECMVRQLVEAANGNIEAAERGIIFIDEIDKTSRKGENLSTTADPGHEGVQQSLLKLLEGNVVNVPEKGRRAHPEADTITVNTENILFIVGGAFEGIEKITAKRLRSENQAGTMGFGSQLVDKKNQQYNEYIEKVSTDDLKKFGMLPELLGRVPVIAPMKELTEDQLVEILHKPKNALTKQYQRLMAQDGVDLQFTDAALRVIARRAVEKKTGARGLRGIMEDILNPVMFETPDRNEDTIIIDANDDDVSITYQTKRRKEAV

SEQ ID NO: 2691 - protein, 402 aa, Unknown
  Description of Unknown: uncultivated organism sequence
  Category: MG90 effectors
  Description: MG90-14 effector
MQTVRYNYRLYPTKTQETVLNRLFGCCRVVYNDTIDFFNNNFNPNNQSKLPTAANASKQILTSAKKTVKRAFLKEVSSVALQQEFRNAWLACLHGVSHTSNQKPAKRKTKKHNPVNSANFTSNGFSINQHGVYISKIGVIKTKWSRPMPSEPTSCTISHARNGRWYASFVVKRPKTPFAQCDNNAGIDMGLTDMATIVNTKGDRWKIANPRNYAKIQDKIGRLQRHLSKQTKGSKRYERTRHQIALLYSKAHDALADYQWKNVLNIIRETQAIGVETLDIKSMTAKHGKSVRDASMRSFLNKLGSKADEHCRVIIRLNQWLVTTKVCALCKHKLKVGLPEYARHWVCPKCGAHLDRDYNAALNILDAAGLAGSLNARGGSVISFLASAENGCSRRTAYHPNF

SEQ ID NO: 2692 - protein, 533 aa, Unknown
  Description of Unknown: uncultivated organism sequence
  Category: MG90 effectors
  Description: MG90-15 effector
MANVLNYKYGIFPTAPQRKHLTRRMRECRLQYNRAVSTRKRLKGSLMCYKTLPVLHEVMGLEKDNTNPNRRTAIEKVGAAYPNIPKDKWSRIYDLKTIFGKTFDIKKRHCDLKVLAAECDALLRAELTEFRAHFRQPESTRPARPPKRPVYFKLLQAASRHAGYEAKIHMDRAFGSRLGISRIRFSVSGCSGGTVANFERACDPSPDQRRIGASGEPNYKRRVDAYGYQVFRNEDILTGNKIKIRGLPTGMDEVEINLHRPLPDGHKLKRVAVMERGGQWQVVMTLEVTDETYQLVPSCPRKAIGLDPGTATALTSAVLDRDTGSIEYGAWDWSPLDAAEDKMEAISQKLSGMQGPDRRTGQRASNRWKKLNARRRRLHATIARRRLDMHHKISRELVNHGLVAIGNWEPPKVVKGRKEFRKGKTKAVEAGPKGIKAKRRGGRDRGIATLRSLAAQKGVRAGVEVIASADERYTTQQCSKCKELTGPKQDLSTRKWTCSKCGSEHDRDQNAALNILNLALEASAKMGTQSLEK

SEQ ID NO: 2693 - protein, 533 aa, Unknown
  Description of Unknown: uncultivated organism sequence
  Category: MG90 effectors
  Description: MG90-16 effector
MANVLNYKYGIFPTAPQRKHLTRRMRECRLQYNRAVSTRKRLKGSLMCYKTLPVLHEVMGLEKDNTNPNRRTAIEKVGAAYPNIPKDKWSRIYDLKTIFGKTFDIKKRHCDLKVLAAECDALLRAELTEFRAHFRQPESTRPARPPKRPVYFKLLQAASRHAGYEAKIHMDRAFGSRLGISRIRFSVSGCSGGTVANFERACDPSPDQRRIGASGEPNYKRRVDAYGYQVFRNEDILTGNKIKIRGLPTGMDEVEINLHRPLPDGHKLKRVAVMERGGQWQVVMTLEVTDETYQLVPSCPRKAIGLDPGTATALTSAVLDRDTGSIEYGAWDWSPLDAAEDKMEAISQKLSGMQGPDRRTGQRASNRWKKLNARRRRLHATIARRRLDMHHKISRELVNHGLVAIGNWEPPKVVKGRKEFRKGKTKAVEAGPKGIKAKRRGGRDRGIATLRSLAAQKGVRAGVEVIASADERYTTQQCSKCKELTGPKQDLSTRKWTCSKCGSEHDRDQNAARNILDLALEASAKMGTQSLEK

SEQ ID NO: 2694 - protein, 394 aa, Unknown
  Description of Unknown: uncultivated organism sequence
  Category: MG90 effectors
  Description: MG90-17 effector
MEEGSADKGHVTIVYPAYPNVGQERELLRTLGVVRGLYNHFLAESIADVIEGDRFPTPREMNKAITVMRGRDIGLGSVAVFTLRDAPLRVHAAMTSFAKLSARSGELRLPRFKSESRYRSLAFDPKGVKFDGRRIVFGKWMKLRCGNLDRNRKLHRPEGGRIVTARIVRKGSGRWYVHITFEVDRRYRSEIDLSDPAEPEAYDLGLCDIITDSKGERIGAPDLYARHENEIARLQRQIASMEDGPNRRKKQRRLSVLHERIRRRRDGYLDEVADRMVSGHSAVILEDLRLRRMIERDDSPAPRRKLFTEAALGTLVRKVEAKAERACIPLVKVDPAYTTRRCSCCGHVGEKMPLSLRVFSCPRCGLEMDRDHNAALNILGSGMGTLQGSAEPSG

SEQ ID NO: 2695 - protein, 394 aa, Unknown
  Description of Unknown: uncultivated organism sequence
  Category: MG90 effectors
  Description: MG90-18 effector
MEEGTADKGHVTIVYPAYPNSSQERELLRTLGVVRGLYNHFLAESIADVMEGDRFPTPREMNKAITVMSGQDAVLRSVSVFTLRDAPLRVHAAMTRFARLSARSGELRLPRFKSESRYRSLAFDPRSVRFDGRRIVFGKWIKLRCGNLDRGRSLHIPEGGRIVAARIVRKGSGRWYVHITFEVDRRYRSEIDLSDPAEPEAYDLGLCDIITDSKGEKIEAPDLYARHENEIARLQRQIASMEDEPGRREKQRRLSVLHERIRRRRDGYLDQVANHMVSGHSAVILEDLRLRRMIERDDSPAPRRKLFTEAALGTLVRKVEAKAERACIPLVKVDPAYTTRRCSCCGHVGDKMPLSLRVFSCPRCGLEMDRDHNAALNILGSGMGTLRESAEPSG

SEQ ID NO: 2696 - protein, 427 aa, Unknown
  Description of Unknown: uncultivated organism sequence
  Category: MG90 effectors
  Description: MG90-19 effector
MEQKKNICSVCGKPYDSHLFFFTHDKEDMCICFDCVEKIYGRIQQDKERYPATENIDETRPPAKKNGRIKPSDIKAYLDQYIIGQDKAKQVLAVAICNHYKMYRLKKNGAVDSIHKEMEKSNVLIVGPSGCGKTAVVKRLGKFLQVPVITVDITAYSAAGYVGKDVETILRDLWIAAEGDISLAEKGIVYIDEVDKISRKGENLSTTTDPGHEEVQQGLLKMLEGNTIDVPKRGNREHPQAETIKINTENILFILGGAFEGIEKIIAQRHKRKSGGSIGIGAVIEDMDDEQTFNKNILDIRTEDLKKFGMLPEFLGRIPVICPMQELTEEALVNILTKPKNAIVKQFQALLADDDIELEFTDKALNKIAQQAIERKTGARSLRGVMEDIMNPVMFRIPDEEGLNKVVVDVDKDDNFDIKEIKEENAA

SEQ ID NO: 2697 - protein, 370 aa, Unknown
  Description of Unknown: uncultivated organism sequence
  Category: MG90 effectors
  Description: MG90-20 effector
MQAVDGLDINILTPAEIKNGLDQYVIGQDEAKRVLAVSVYNHYKRILSGKGADVELQKSNVLLLGPSGVGKTLLAQTLAKMLGVPFAIADATTLTEAGYVGEDVENILLKLLQAADFDVQKAQVGIIYIDEIDKITRKSENPSITRDVGGEGVQQALLKILEGTVSNVPPNGGRKHPQQEFIQIDTTNILFICGGAFDGLDKYILRRTDRSALGFGSSLKDNSEDAQRALLRKVEPHDLVKFGLIPELIGRLPVITVLDDLDEDALVRVLKEPRNSLVKQYKELLSMDSVELEFTDEALHAIARKTIERKTGARGLRSVMEGILLPVMYDVPNDPTIIRVTIDKDTVEGGEAHLEYGAVRKRYKNQTALS

SEQ ID NO: 2698 - protein, 408 aa, Unknown
  Description of Unknown: uncultivated organism sequence
  Category: MG90 effectors
  Description: MG90-21 effector
MVNKNNEFCCMCGSKEDEVDKLIRGKYGYICDNCISIASDLLNDDEEEKNITNNMQLATPSQIKAHLDQYVIGQDEAKRTLAVAVYNHYKRLKQNKKSDVEIQKSNILMIGSTGSGKTYLAQSLAKFLGVPFAIADATTLTEAGYVGDDVETMLRTLLQNANYNIESAQRGIIYIDEIDKISRKGENMSITRDVSGEGVQQALLKIIEGTISEVPVTGGRKHPQGETVKINTSNILFICGGAFDGIEKIIGKEEIHNSIGFGANITDKKESVADLSKVEQHDLVKYGLMPELIGRLPIITTLNPLSEDDLVHILTEPKNAITKQYQELLAMDGVKLEFEDEALRKIAELAIQKKSGARGLRSIIESAMQKVMFDVPDMSSAKKVVITAECVEGKADALVYGARNKKIA

SEQ ID NO: 2699 - protein, 366 aa, Unknown
  Description of Unknown: uncultivated organism sequence
  Category: MG90 effectors
  Description: MG90-22 effector
MRNRGGPWNICGKFPPEIKKFLDEYVIGQEYAKKVISVAVYNHYQRITAPRTAPQLDKSNILLIGPTGVGKTLIAETLARFLKVPFAIADATPLTEAGYVGEDVENILLRLLQAADGNIQLAEIGIVYIDEIDKIGRKSESPSITRDVSGEGVQQALLKILEGTVANVPPQGGRKHPGQQFLQVNTRNILFICGGTFEGLDKIIERRICSGTIGFAANITRTHPENEDELLRCVQPDDLIKYGMIPEFVGRLPVIAPLHSLSQSALIDILTQPKNALLKQYAYYFEREGVKLTFTPEALAAVAERALQLRTGARGLRAVLEETMLEIMFELPTRHNIIECIITPEVIRKEKPPVYIHGRRTVRRTH

SEQ ID NO: 2700 - protein, 412 aa, Unknown
  Description of Unknown: uncultivated organism sequence
  Category: MG90 effectors
  Description: MG90-23 effector
MFETKIPIRRCSFCGKGQNEVEALITGPNGVAICNVCVDECYEMIHQKEGEKGKSPVEIGKLPTPKEIKEFLDQYVIGQEEAKKVLSVAVYNHYKRIISREKGEDEVELEKSNILLIGPTGSGKTLLARSLAKLLDVPFAIADATTLTEAGYVGEDVENILLRLIQAADYDIEKAERGIIYIDEIDKISRKSENPSITRDVSGEGVQQALLKILEGTIANVPPQGGRKHPHQQYIQIDTSNILFICGGAFVGLEEIIARRIGKGTMGFTADVDKIKMDRDQLLKYVEPDDLVKFGLIPELIGRLPVVATLSELKEEDLVRILKEPKNALVKQYQKLLELEGVELVFTDDALREIAREAIRRKTGARGLRAIMEKIMMDVMFEVPHRKEIKKVIIDKKAVKTGKPKYEVAKAS

SEQ ID NO: 2701 - protein, 427 aa, Unknown
  Description of Unknown: uncultivated organism sequence
  Category: MG90 effectors
  Description: MG90-24 effector
MAKNDEKLIRCSFCGKREDEVDRIVRGLDAFICNECVKLCGEIMGFDYEEPEYTVEQYEGDLPFQEIPKPREIKEYLDEYIIGQDEAKKAISVAVYNHYKRILAEDQGDTELQKSNVLLIGPTGSGKTLFAQTLAKLLKVPFAIADATTLTEAGYVGDDVENILLRLLQAADFNVPLAEHGIIYIDELDKIARKSENTSITRDVSGEGVQQALLKILEGTVAGVPPLGGRKHPQQEFIQVNTKNILFICGGAFDGIEKIIEQRLDKKSMGFGADIKSKRERAAGEIMLSVRSHDLQKFGIIPELIGRMPVIVPMKQLTRDDLVRILKEPKNAITKQYKALMKYDGVTLEFEEGALEAIADRAIELDIGARGLRSVVESIMTDVMYDVPSQDRIEKVIITEASVREGTGPKLVRRPKPRIDPDLALNL

SEQ ID NO: 2702 - protein, 442 aa, Unknown
  Description of Unknown: uncultivated organism sequence
  Category: MG90 effectors
  Description: MG90-25 effector
MARNDQMRLRCSFCGKTQDQVDKLISGMNDTFICDECVELCAELVNDDLELRAAQKRQRAQKNAKPLPKPQEIKATLDEYVIGQDRAKITLSVAVYNHYKRIFCGDQTDVELQKSNVLLLGPTGVGKTMLAQTLARTLDVPFAVADATTLTEAGYVGEDVENILLRLIQAAEFDVERAETGIIYIDEIDKIARKSENPSITRDVSGEGVQQALLKILEGTVSNVPPQGGRKHPQQEFIQVDTSNILFICGGAFDGIEKIVEKRSGNGGLGFGAEIKSTKELELTEAMQNVIPQDLVKYGLIPELVGRIPVLTTLDDLDEDALVRILKEPKNSLVKQYQELFRMDNVELELDDAALRAIAKETLEKKTGARGLRGVMERVLQPLMYESPSDYRIEKITITEDYVLGNSEPLLVRNEAREQPAPLLVAPASAAPQRRNRRGNVS

SEQ ID NO: 2703 - protein, 405 aa, Unknown
  Description of Unknown: uncultivated organism sequence
  Category: MG90 effectors
  Description: MG90-26 effector
MLIQGPDAYICDECVENCRSIIEGGESSKRRQSNRRTPSPRVLPKPQEIKAQLDEYVIGQDEAKIALSVAVYNHYKRIYRRHRVDVELVKSNILLLGPTGVGKTLLAQTLAKTLDVPFAIADATTLTEAGYVGEDVENILLRLIQAADYDVEKAQRGIIYVDEIDKIARKSENPSITRDVSGEGVQQALLKILEGTVANVPPQGGRKHPQQEFIQIDTSNILFICGGAFDGIEKIVEKRLGNKVLGFGSELQSKSEFEADTVMTKVIPADLVKFGLIPELVGRMPVLTALRNLDENALVKILTEPKNALIKQYKGLFSIDNVELDFEDDALKLIAKTALESKTGARGLRAIMERILLPVMFTTPSDPSIEKITITADCVKNAGMPEIEKNPARLAPKNLPADTTA

SEQ ID NO: 2704 - protein, 427 aa, Unknown
  Description of Unknown: uncultivated organism sequence
  Category: MG90 effectors
  Description: MG90-27 effector
MEKSKLDVVCSFCGKKIPSDVMVAQGIDEDTFICQHCLIALEETFRAADTLIENEEEEHKKDDKKHKRLPRPSEIKAHLDQYIIGQEYAKKVLSVAVYNHYKMLGVKFGNKAVNKDVELEKSNVLLAGPSGSGKTAILKALAKFLKVPFVIADSTEYTSAGYVGKDVECIARDMISAANGDIKKAERGIVYIDEIDKTSRKGENLSTTSDPGHEGTQQALLKLLEGTMLDVPMDGRRLNPESRNVQKISTENMLFIVGGAFEGIEKIIAKRKRQGQNTMGIGAKLVDRKNDKYNDFIEDLATEDLKKFGMLPELLGRVPVIAPLKELTEDQLVQILHEPKNALVKQYQELFIQDGIQLEVTENAMKAIARKAIKRKTGARGLRGIMENILNPVMFSAPDKDIDYVLVDAEDDEIKIKGKKRKVKEAV

SEQ ID NO: 2705 - protein, 475 aa, Unknown
  Description of Unknown: uncultivated organism sequence
  Category: MG90 effectors
  Description: MG90-28 effector
MKDYEEELKDTKDGSGKNENKEDYEDICYICRRPESKVGKLIHLPMEGICICPDCMQRSFTAMSNTNINYEDLMRNMNLQDMFPGNIQDGIPKSQRLKKKKPKDKNEPAIDLKQILPPHQIKARLDDYVIGQDYAKKVMSVAVYNHYKRVATNTMDEIEIEKSNMLMIGPTGCGKTYLVRTLARLLDVPLAIADATSLTEAGYIGDDIESVVSKLLAAADNDVEKAERGIIFIDEIDKIAKKKNTTSRDVSGESVQQGLLKLLEGSDVEVPVGASSKNAMVPLTTVNTRNILFICGGAFPDLEGIIKARLNKTSGIGFGAALNDAHDQDPDIMSRVTIDDLREFGMIPEFIGRLPVIFTLKGLDEEALVKILKEPKNAIIKQYQKLLALDEVDLQFDDGALEAIAKRAIEKKTGARALRSIIEELMLDIMYQIPKDDNIGRVTITQPYVEHTGGPLIEMRGVFSLPNKTPAVGIE

SEQ ID NO: 2706 - protein, 427 aa, Unknown
  Description of Unknown: uncultivated organism sequence
  Category: MG90 effectors
  Description: MG90-29 effector
MEKEGKIYCDFCGKEIEPGEFGATGINGVFICQDCLKEFHESVMAQDTYLESEKKKQEREEVEKEDFQIPRPSMIKAHLDKYIEGQDYAKRVLSVAVYNHYKMLRAKHSGEYNNKDVELEKSNILLCGPTGSGKTAVLRALSKYLKVPFTMADITSYSSAGYVGKDVETIIRDLIVAADGDVKAAERGIVYIDEIDKTSRKGENLSTTSDPGHEGVQQALLKLLEGQMVEVPNKGRRLHPESNNTTMVNTANILFIVGGAFEGIEKIVSQRLHQHSSSMGFGAKLEDKKNDQYNDFIEKVTTEDFRKFGMLPELLGRVPVIAPMKQLSEEQLVHILYRPKNALVKQYQELLSQDNVDLKFTQKALKSIAHDAIKRKTGARGLRGIMEDILNPVMFEVPDKDVDAVVVDADDDDKIKIEYKDLKKEAV

SEQ ID NO: 2707 - protein, 416 aa, Unknown
  Description of Unknown: uncultivated organism sequence
  Category: MG90 effectors
  Description: MG90-30 effector
MSDELENLRCNFCGFKADLEEGIILIKGLDDVCICSECAEECVAIAEEENKIDSEKEMNLDVKPSEIKAYLDKYIIGQNYAKETLSVAVFNHYKMLKYKQQKKQAVELEKSNVLILGPTGTGKTYILRTLANFLNVPFAISDATSLTEAGYVGEDVENVVRRLIDAADGDIERAQTGIIYIDEVDKLTRKGENVSITRDVGGEGVQQAILKMVEGSLVEVPPQGGRKHPQQECAKIDTSNILFIIGGSFEGIDKIISKRQTKDSTIGFGGQIIDKKETSINEVIESVTVDDLKKFGMIPELLGRFPVIAPLKELDNNALQSILTEPKNALVKQYQELFKMDGIKLTFRKDALKAIAQLAQERKTGARALRGIMEDVLHKHMYSLPDDSTIKEVIITEDVVLKKSDPEIKRKKEQAS

SEQ ID NO: 2708 - protein, 419 aa, Unknown
  Description of Unknown: uncultivated organism sequence
  Category: MG90 effectors
  Description: MG90-31 effector
MISTIFINKGEFIMAKNNEFCCMCGSKKDEVDKLIRGKYGYICDSCISIASDLLNDEEEENITNNMQLATPSQIKAHLDQYVIGQDEAKRTLAVAVYNHYKRLKQNKKSDVEIQKSNILMIGSTGSGKTLIAQSLAKFLGVPFAIADATTLTEAGYVGDDVEVMLRTLLQNANYDIESAQRGIIYIDEIDKISRKGENVSITRDVSGEGVQQALLKIIEGTISEVPVTGSRKHPQAETIKIDTSNILFICGGAFDGIDKIIGKEETHNSIGFGANVADKKESVADLSKVEQHDLVKYGLMPELIGRLPIITALNPLSEEDLVHILTEPKNAITKQYQELLSMDGVKLEFEGEALRKISELAIKKKTGARGLRSIIESAMQKVMFDVPDMASVKKVVVTADCVEGKADALVYGARNKKIA

SEQ ID NO: 2709 - protein, 428 aa, Unknown
  Description of Unknown: uncultivated organism sequence
  Category: MG90 effectors
  Description: MG90-32 effector
MAKQEPQHIKCSLCQRDITVHDQYDLPIYDPRSGFAICKSCIREIYHFIEENDHQEAIVQQKDFAMTLDAKLAKIKPHIIKQYLDEYIINQERAKKILSVAVYNHYKRMKYSYLHEDETEIEKSNVIMLGPSGCGKTALLSHLATLLDIPFAVTDASSLTEAGFVGADVEVAVRNLYYAADKNTEKAEHGIIYLDEFDKIARKSGENNSITADPGHEGVQQALLKMLEGSVVEFTARGQRKHPEAPTIKVDTRNILFIVGGAFVGIEKIIAKRLKNTDTNIGFGAKVPSKEEKPKFDELIHKVRPEDLMKFGIIPEIIGRLPVICTLETLDEDALLRILTEPKNAPVKQYEKLLAMDNVQLEFSDTALRAVARKAIERKTGARSLKGIIEDVMLDIMFDIPKSDAKRKVTITEECLEKGENPKIEEIA

SEQ ID NO: 2710 - protein, 410 aa, Unknown
  Description of Unknown: uncultivated organism sequence
  Category: MG90 effectors
  Description: MG90-33 effector
MLETQIPPRRCSFCGKESAEVEALITGPKGVAICNFCVDECYEMIHSQVQEEKNIGEPANLPTPKEIKEFLDQYAIGQDEAKKVLSVAVYNHYKRIFSQTSSDDVDIEKSNILLIGPTGSGKTLLARSLAKLLDVPFAIADATTLTEAGYVGEDVENILLRLLQNADMDVEKAERGIIYIDEIDKIGRKSENSSITRDVSGEGVQQALLKILEGTVANVPPQGGRKHPQQQYIQIDTSNILFICGGAFVGLEDIIAKRIGKGTMGFNADLNKKKLERDELFQHVEPEDLVRFGLIPELIGRLPVIATLSELREEDLVKILNEPKNALVKQYKKLLDLEGVELEFTEEALREIAKEAIKRKTGARGLRAIMEKIMMDVMFEVPTKKNIKKVIIDNEAVLEGKPKYKLAKAS

SEQ ID NO: 2711 - protein, 474 aa, Unknown
  Description of Unknown: uncultivated organism sequence
  Category: MG90 effectors
  Description: MG90-34 effector
MKDYEEVKDTKDITEETEHKDDYEDVCYLCRRPESKVGKLIRLPMEGICICPDCMQRSFTMMGNTNINYEDLMKNMNLQDMFPGNIQDGIPKSQRLKKKKPKEKNEPVIDLKQILPPHQIKARLDDYVIGQDYAKKVMSVAVYNHYKRVATNTMDEIEIEKSNMLMIGPTGCGKTYLVRTLARLLDVPLAIADATSLTEAGYIGDDIESVVSKLLAAADNDVEKAERGIIFIDEIDKIAKKKNTTSRDVSGESVQQGLLKLLEGSDVEVPVGASSKNAMVPLTTVNTRNILFICGGAFPDLDGIIKARLNKTSGIGFGAMLSDAHDQDSDIVSQVTIDDLREFGMIPEFIGRLPVIFTLKGLDEAALVKILKEPKNAIIKQYQKLLALDEVDLQFDDGALEAIAKRAIEKKTGARALRSIIEELMLDIMYQIPKDDNIGRVTITQPYVEHRGGPLIEMRGIFSLPNKTPVAGIE

SEQ ID NO: 2712 - protein, 359 aa, Unknown
  Description of Unknown: uncultivated organism sequence
  Category: MG90 effectors
  Description: MG90-35 effector
MTPAEIKEGLDQYVIGQDEAKRVLSVSVYNHYKRILSGKGGDVELQKSNVLLLGPSGVGKTLLAQTLAKMLGVPFAIADATTLTEAGYVGEDVENILLKLIQAADFDVQKAQIGIIYIDEIDKITRKSENPSITRDVGGEGVQQALLKILEGTVSNVPPQGGRKHPQQEFIQIDTTNILFICGGAFDGLDKYILRRTDKSALGFGSALKDNSTEAERALLRKVEPHDLVKFGLIPELIGRLPVITVLDDLDEDALVRVLKEPRNSLVKQYKELLGMDNVELTFTDEALHAIARKTIERKTGARGLRSVMESILLPIMYEVPSDATIIRVTVDEDTVEGGEAHLEYGAVRKRYKNQAALS

SEQ ID NO: 2713 - protein, 428 aa, Unknown
  Description of Unknown: uncultivated organism sequence
  Category: MG90 effectors
  Description: MG90-36 effector
MAKQEPQHIKCSLCQRDITVHDQYDLPIYDPRSGFAICKSCIREIYHFIEENDHQEAIVQQKDFAMTLDAKLAKIKPHIIKQYLDEYIINQERAKKILSVAVYNHYKRMKYSYLHENETEIEKSNVIMLGPSGCGKTALLSHLATLLDIPFAVTDASSLTEAGFVGADVEVAVRNLYYAADKNTEKAEHGIIYLDEFDKIARKSGENNSITADPGHEGVQQALLKMLEGSVVEFTARGQRKHPEAPTIKVDTRNILFIVGGAFVGIEKIIAKRLKNTDTNIGFGAKVPSKEEKPKFDELIHKVRPEDLMKFGIIPEIIGRLPVICTLETLDEDALLRILTEPKNAPVKQYEKLLAMDNVQLEFSDTALRAVARKAIERKTGARSLKGIIEDVMLDIMFDIPKSDAKRKVTITEECLEKGENPKIEEIA

SEQ ID NO: 2714 - protein, 411 aa, Unknown
  Description of Unknown: uncultivated organism sequence
  Category: MG90 effectors
  Description: MG90-37 effector
MFETNIPERRCSFCGKAQSEVEALITGPKGVAICNQCVDECYKLLHEKEERKKGAPVKVEKLPTPKEIKEFLDQYVIGQEEAKKVLSVAVYNHYKRIMSGGNVDDVELEKSNILLIGPTGSGKTLLARSLAKLLDVPFAIADATTLTEAGYVGEDVENILLRLIQAADYDIEKAERGIIYIDEIDKIARKSENPSITRDVSGEGVQQALLKILEGTIANVPPQGGRKHPHQQYIQIDTSNILFICGGAFVGLEDIIARRIGKGAMGFTADVDKKKMERDELLKHVEPDDLVKFGLIPELIGRLPVIATLKELTEEDLVRVLTEPKNALVKQYKKMLELEGVELEFTEDALREIAREAIRRKTGARGLRAIMEKIMTDVMFEVPTRKDIKKVIIDAESVKTGKPKYELTKAS

SEQ ID NO: 2715 - protein, 472 aa, Unknown
  Description of Unknown: uncultivated organism sequence
  Category: MG90 effectors
  Description: MG90-38 effector
MSDYLDKNTEEKDKDKEYEDICYVCRRPESKAGKMIHLPINNICVCADCMQKSFDTMNKGGFNYSDMMNLNQLNNLNFQELLGMPVMNSGEDPIPQSQKLKKKKPKEEQAPALDIRDIPKPHVIKAQLDDYIIGQEYAKKVVSVAVYNHYKRVATNTMDDIEIEKSNMLMIGPTGCGKTYLVRTLAKLLDVPLAITDATTLTEAGYIGDDVESVVSKLLANADNDVEKAERGIIFIDEIDKIAKKKNTTSRDVSGESVQQGLLKLLEGSDIEVPVGASSKNAMVPMTTVNTRNILFICGGAFPDLENIIKERLTKQSSIGFIADLKDKYDNEENLISKVTIEDLRKFGMIPEFIGRLPVIFTLQGLTKDMLVKILKEPKNAILKQYQKLLALDEVDLQFEDGALEAIAEKALEKKTGARALRSIIEEFMLDIMYEIPKDDNIGRVTITRDYIENTGGPRIEMRGASALPMHS

SEQ ID NO: 2716 - protein, 406 aa, Unknown
  Description of Unknown: uncultivated organism sequence
  Category: MG90 effectors
  Description: MG90-39 effector
MAKNNEYCCMCGSRKDEVEKLIRGKYGYICDSCISIASDLINDEEEESITNNMQLATPSQIKAHLDQYVIGQDEAKRTLAVAVYNHYKRLKQNKKSDVEIQKSNILMIGSTGSGKTYLAQSLAKFLGVPFAITDATTLTEAGYVGDDVEVMLRTLLQNANYDIESAQRGIIYIDEIDKISRKGENMSITRDVSGEGVQQALLKIIEGTISEVPVTGSRKHPQADTIKIDTSNILFICGGAFDGIDKIIGKEETHNSIGFGANVTDKKESVADLSKVEQHDLVKYGLMPELIGRLPIITALNPLSEDDLVRILTDPKNAITKQYQELLSMDGIKLEFEDEALRKIAELAIKKKTGARGLRSIIESAMQKVMFDVPDMSSAKKVVVTAACVEGKADALVYGARNKKIA

SEQ ID NO: 2717 - protein, 418 aa, Unknown
  Description of Unknown: uncultivated organism sequence
  Category: MG90 effectors
  Description: MG90-40 effector
MEERDIIVSMTAAGNNNQTVRYNYRLYPTKTQEAVLNRLFGCCRVVYNDTIDFFNNNFNPNNQSKLPTAANASKQILTNAKKTTKRAFLKEVSSVALQQELRNAWLACLHGVSHSSNQKPAKRKTKKHNPVNSANFTSNGFSINQHGVYISKIGVIKTKWSRPMPSEPTSCTISHARNGRWYASFVVKRPKTPFAQCDNNAGIDMGLTDMATIVNTKGKRWKIENPRNYAKIQDKIGRLQRHLSKQTKGSKRYERTRHQIALLYSKAHDALADYQWKNVLNIIRETQAIGVETLDIKSMAVKHGKSVRDASMRSFLNKLGSKADEHCRVIIQLNQWLVTTKVCALCKHKLKVGLPEYARHWVCPKCGAHLDRDYNAALNILDAAGLAGSLNARGGSVRSFLVSAENGCSRGTAYHPNF

SEQ ID NO: 2718 - protein, 439 aa, Unknown
  Description of Unknown: uncultivated organism sequence
  Category: MG90 effectors
  Description: MG90-41 effector
MIDWGLQQHVTSKLTVPKPKDIKAKLDEYIVKQDHAKKVLAVAVHNHYKRIMSPAKDGIELGKSNILLIGPTGTGKTLLAQTLAKILDVPFAMADATSLTEAGYVGDDVENVVLNLVNAADGDIERACRGIIYIDEIDKIAKKGENPSITRDVSGEGVQQSLLKMIEGTVAAVPPKGGRKHPQQEFLRVDTTNILFICGGAFVGLADIIDKRTSLGSMGFNANVVNKDKRDLSALYHALEPEDLLKFGLIPELVGRLPVVATLEPLDEAALTEILTEPKNSLVKQYKKMFKIDGVDLEFDDDALAEIAKLAIKKESGARGLRSILENAMMPFLYAVPGMPNMKKLVITRDIIAKQGDLSQIDELNARYNAKQDDKSSNASTKTSDAESDDATSDDAKSGSDQSDDKSISSDDTIDDKSSNADDKKAKSARAKKTKKTDP

SEQ ID NO: 2719 - protein, 442 aa, Unknown
  Description of Unknown: uncultivated organism sequence
  Category: MG90 effectors
  Description: MG90-42 effector
MAENKDMTPDNSVEEKETIVCDFCGRRQKDPKDPVYGSRDGKSWICGECISTIHKVMNTKDTTVERIKAGAAASSPQKINIGTPAKIKAYLDQYIEGQEYAKRVLSVAVYNHYKMLKIKHRQEKSGEPPKVELEKANTIIIGPTGCGKTAIIRHLAKKLGVPFIITDATLYTSSGYVGSDVETIIRDLVKAAGGDVEAAQRGIVYIDEIDKTGRKGENLSTTSDPGHEGAQQALLKLLEGTMLEVPVGNNRKHPNAETFMVNTENILFIIGGSFEGIEKIIAKRLRDESGAGKIGFGSKLVDEKNKLFNEYIEKVTVDDLKKFGMLPELLGRVPVVAPMKELTEDQLMSILYRPKNALVKQYQELFAHDGVTLTVTEGAMRAIAQMAIRRKTGARGLRGIMETILNPVMFELPERSENAVLVDVVDGKINVAYEDKEEREAV

SEQ ID NO: 2720 - protein, 448 aa, Unknown
  Description of Unknown: uncultivated organism sequence
  Category: MG90 effectors
  Description: MG90-43 effector
MFDKKKTDDLRCSICGRHKNDTEVLVDTGQGILICDRCVKGLMKAMGIEAPAKSPADATAATGSEAAAAGEKKTAQEPAAPELEGKLPTPQELYAHLNNYVIGQEKAKRVLSVAVYNHYKRLRHANDDGVELSKSNVLLVGPTGSGKTLLAQTLARGLNVPFAIADATTLTEAGYVGEDVENIIHKLLQAADGNVERAQRGIVYLDEIDKIARKSENPSITRDVSGEGVQQALLKLVEGTLCNVPAAGGRKNPRGQMIAVDTSNILFICGGAFDGLEKIVRRRSVKSGIGFSAQVKSEKEASLSELLQDVEPSDLVKYGLIPELVGRLPVIAVLQELTEEGFVSILTEPKNALIKQFKELFAMEGVELEVTADALKAIAHKAMERKTGARGLRSIVEAALLDAMFEVPAKPEIGRVVLDKATIETGAPVDMIACPRKDPVKPEASQAS

SEQ ID NO: 2721 - protein, 413 aa, Unknown
  Description of Unknown: uncultivated organism sequence
  Category: MG90 effectors
  Description: MG90-44 effector
MNKVNDKMQKCSFCGAMASESDDNVLIQSENENSFICIDCIDTISLKMQKFKKKKAAIMSKKNLELSSLTPKRIKQFLDDYIIGQEEAKKIISVAVYNHYKSISIKERDPEIELEKSNIIMLGPSGCGKTAVVKALSKMLNVPFAIADASTLTAAGYVGSDVEVVLQRLLSSADNNVEEAQKGIVYIDEIDKISRKGENLSTTADPGHEEVQQALLKIIEGSIVDVPQKGNRKHPHGENIKMDTSNILFIVGGAFEGIEKIVAKRQKKGKTKIGFGSELKDDEKTYNELVNNVKVEDLKKFGMIPELLGRLPIICTMKELDENALIKILTEPKNALIKQYKRLLQEDGVELNVSDLALKAIANRAKERKTGARSLRSILEEILNPTMFDLPEKEVNQITLDINNNDFVVNYNK

SEQ ID NO: 2722 - protein, 407 aa, Unknown
  Description of Unknown: uncultivated organism sequence
  Category: MG90 effectors
  Description: MG90-45 effector
MANKNNEFCCMCGSKKDEVDKLIRGKYGYICDSCISIANDLLNDEEEESITNNMQLGTPSQIKAHLDQYVIGQDEAKRTLAVAVYNHYKRLKQNKKSDVEIQKSNILMIGSTGSGKTYLAQSLAKFLGVPFAIADATTLTEAGYVGDDVEVMLRTLLQNANYDIQAAQRGIIYIDEIDKISRKGENMSITRDVSGEGVQQALLKIIEGTVSEVPVTGSRKHPQAETIKIDTSNILFICGGAFDGIDKIIGKEETHNSIGFGANVADKKESITDLSKVEQHDLVKYGLMPELIGRLPIITALNPLSEDDLVHILTEPKNAITKQYQELLSMDGVKLEFEDEALRKIAELAIQKKTGARGLRSIIESAMQKVMFDVPDMSSAKKVVVTAACVEGKADALVYGARNKKIA

SEQ ID NO: 2723 - protein, 448 aa, Unknown
  Description of Unknown: uncultivated organism sequence
  Category: MG90 effectors
  Description: MG90-46 effector
MFDKKKTDDLRCSICGRHKNDTEVLVDTGQGILICDRCVKGLMKAMGIEAPAKSPADATAATGSEAAAAGEKKTAQEPAAPELEGKLPTPQELYAHLNNYVIGQEKAKRVLSVAVYNHYKRLRHANDDGVELSKSNVLLVGPTGSGKTLLAQTLARGLNVPFAIADATTLTEAGYVGEDVENIIHKLLQAADGNVERAQRGIVYLDEIDKIARKSENPSITRDVSGEGVQQALLKLVEGTLCNVPAAGGRKNPRGQMIAVDTSNILFICGGAFDGLEKIVRRRSVKFGIGFSAQVKSEKEASLSELLQDVEPSDLVKYGLIPELVGRLPVIAVLQELTEEGFVSILTEPRNALIKQFKELFAMEGVELEVTADALKAIAHKAMERKTGARGLRSIVEAALLDAMFEVPAKPEIGRVVLDKATIETGAPVDMIACPRKDPVKPEASQAS

SEQ ID NO: 2724 - protein, 361 aa, Unknown
  Description of Unknown: uncultivated organism sequence
  Category: MG90 effectors
  Description: MG90-47 effector
MHDSQGNRLRFEDLPKPAEIKAKLDEYIVGQDRAKVVLSVAVYNHYKRILYAGDNDVELQKSNILLIGPTGSGKTLFAQSLAKMLNVPFAIADATTLTEAGYVGEDVENILLRLLQAADFDVERAEKGIIYIDEIDKIARKSENTSITRDVSGEGVQQALLKLLEGTVANVPPQGGRKHPHQEFIKVDTTNILFICGGAFDGLDKIIEKRTEKKSMGFGADIKSSTERDVGELLKQAQQHDLLKFGIIPELIGRLPVIAPLTSLKREDLVRILTEPKNAMTKQYEALMAYDGVELVYEKDALEAVADKAIEMKIGARGLRSVMEGIMTDIMYTVPSEHDIEKVIVTADCVKNGTGPDVIRK

SEQ ID NO: 2725 - protein, 442 aa, Unknown
  Description of Unknown: uncultivated organism sequence
  Category: MG90 effectors
  Description: MG90-48 effector
MSDTKERCSFCGKEESDDRLLIGSEDGCAFICKHCFDRLKDEFADETLLKEESLNWKDLTPSKIKSYLDKYIIGQDRAKKVLSVAVYNHYKMLDYAKQQSDVELEKSNIIMVGPTGVGKTAIIKALAKILNVPFAITDATTLTENGYVGADPECCVQRLLYAADGDVDKTETGIIYIDEIDKIACKGENMSITRDVSGEGVQQALLKIIEGTIVDVPEKGVRKHPNAETIRVDTSKILFIVGGAFPGLEKIIKKRKKISNKAKIGFADGNAEKTAEEVTYNEVIDDVSPEDLKKFGIIAELLGRLPIITPLHELTEDQLCQILTEPKNALVRQYTEIFKYDDTDLVFEKDALKSIAARAIKNGTGARGLRAILESLLLDKMYEIPDLKQKNTLTITKQYVESKNAKEVSKHNGTGKQTVSTVLRRRQKPGESGTGCPDVAKS

SEQ ID NO: 2726 - protein, 373 aa, Unknown
  Description of Unknown: uncultivated organism sequence
  Category: MG90 effectors
  Description: MG90-49 effector
MVSNAPEPEEEIIDLPKPSEIKAYLDQYVIGQEEAKMIISVAVYNHYKRIFSQKKDDDIDLEKSNILMIGPTGCGKTLIAETLARFLKVPFAISDATTLTEAGYVGEDVENILVRLLQAADYDVAKAEKGIVYIDEIDKISRKSETPSITRDVSGEGVQQALLKILEGTKVNVPPKGGRKHPQQDFIEMDTKNILFIAGGAFFGLEKIIKERIDKKAIGFDVKLGTNIDEANIFDQTISQDLLKYGLIPELIGRMPVLCTLHELTEEALVEILVKPKNALCSQYKKYFELDGVELEFGEDALREIARIAINQKTGARGLRSIMEKFMLKIMYNIPDLDNIRSCHITADVVSKGEEPEFVFSSKSSNKRAAITR

SEQ ID NO: 2727 - protein, 394 aa, Unknown
  Description of Unknown: uncultivated organism sequence
  Category: MG90 effectors
  Description: MG90-50 effector
MKYCTVLEWCRSRKRDSEQAPKDLEDIRLMPPTEIKKVLDEYVIGQDMAKISLAVSVYNHYKRILSQEDDEDEVELQKSNVLLLGPTGVGKTFLAQTLAKILDVPFAIADATTITEAGYVGDDVENVLLRLLQAADFDVEAAERGIIYIDEIDKISRKSENVSLTRDVSGEGVQQALLKIVEGTVSNVPPQGGRKHPNQECIQVNTKNILFICGGAFDGLEKIIQKRQSPSGLGFGAPVAQSKKELSNIFRQAIPQDLVKFGLVPELVGRLPVITTLDDLDEDALIRILTEPKNALVKQYQKLFSYDEIELELEPNALRGIAKKAIERKTGARGLRSIMEGILMETMYQVPQMESVARVVITADCVEGTKKPTLLAKDGTEIPYPESESKAINA

SEQ ID NO: 2728 - protein, 359 aa, Unknown
  Description of Unknown: uncultivated organism sequence
  Category: MG90 effectors
  Description: MG90-51 effector
MTPAEIKDGLDQYVIGQDEAKRVLSVSVYNHYKRILSGKGGDVELQKSNVLLLGPSGVGKTLLAQTLAKMLGVPFAIADATTLTEAGYVGEDVENILLKLIQAADFDVQKAQIGIIYIDEIDKITRKSENPSITRDVGGEGVQQALLKILEGTVSNVPPQGGRKHPQQEFIQIDTTNILFICGGAFDGLDKYILRRTDKSALGFGSSLKDNSSEAERALLRKVEPHDLVKFGLIPELIGRLPVITVLDDLDEDALVRVLKEPRNSLVKQYKELLGMDNVELTFTDEALHAIARKTIERKTGARGLRSVMESILLPIMYEVPSDATIIRVTVDEDTVEGGEAHLEYGAVRKRYKNQVALS

SEQ ID NO: 2729 - protein, 448 aa, Unknown
  Description of Unknown: uncultivated organism sequence
  Category: MG90 effectors
  Description: MG90-52 effector
MFDKKKTDDLRCSICGRHKNDTEVLVDTGQGILICDRCVKGLMKAMGIEAPAKSPADATAATGSEAAAAGEKKTAQEPAAPELEGKLPTPQELYAHLNNYVIGQEKAKRVLSVAVYNHYKRLRHANDDGVELSKSNVLLVGPTGSGKTLLAQTLARGLNVPFAIADATTLTEAGYVGEDVENIIHKLLQAADGNVERAQRGIVYLDEIDKIARKSENPSITRDVSGEGVQQALLKLVEGTLCNVPAAGGRKNPRGQMIAVDTSNILFICGGAFDGLEKIVRRRSVKSGIGFSAQVKSEKEASLSELLQDVEPSDLVKYGLIPELVGRLPVIAVLQELTEEGFVSILTEPRNALIKQFKELFAMEGVELEVTADALKAIAHKAMERKTGARGLRSIVEAALLDAMFEVPAKPEIGRVVLDKATIETGAPVDMIACPRKDPVKPEASQAS

SEQ ID NO: 2730 - protein, 377 aa, Unknown
  Description of Unknown: uncultivated organism sequence
  Category: MG90 effectors
  Description: MG90-53 effector
MKSAQEPAAPELEGKLPTPQELYAHLNNYVIGQEKAKRVLSVAVYNHYKRLRHANDDGVELSKSNVLLVGPTGSGKTLLAQTLARGLNVPFAIADATTLTEAGYVGEDVENIIHKLLQAADGNVERAQRGIVYLDEIDKIARKSENPSITRDVSGEGVQQALLKLVEGTLCNVPAAGGRKNPRGQMIAVDTSNILFICGGAFDGLEKIVRRRSVKSGIGFSAQVKSEKEASLSELLQDVEPSDLVKYGLIPELVGRLPVIAVLQELTEEGFVSILTEPRNALIKQFKELFAMEGVELEVTAGALKAIAHKAMERKTGARGLRSIVEAALLDAMFEVPAKPEIGRVVLDKATIETGAPVDMIACPRKDPVKPEASQAS

SEQ ID NO: 2731 - protein, 407 aa, Unknown
  Description of Unknown: uncultivated organism sequence
  Category: MG90 effectors
  Description: MG90-54 effector
MANKNNEYCYMCGSKKDEVDKLIRGKYGYICDSCISIASELLNDEEEESITNNMQLATPSQIKAHLDQYVIGQDEAKRTLAVAVYNHYKRLKQNKKSDVEIQKSNILMIGSTGSGKTLIAQSLAKFLGVPFAIADATTLTEAGYVGSDVETMLRTLLQNADYDIQAAQRGIIYIDEIDKISRKSENVSITRDVSGEGVQQALLKIIEGTVSEVPVTGGRKHPQAETIKIDTSNILFICGGAFDGIDKIIGKEETHNSIGFGANVSDKKESVTDLSKVEQHDLVKYGLMPELIGRLPIITALNPLSEEDLVHILTEPKNAITKQYQELLSMDGVKLEFEDEALRKIAELAIKKKTGARGLRSIIEGSMQKIMFEIPDMSIAKKVVVTAACVEGKADALVYGARNKKIA

SEQ ID NO: 2732 - protein, 448 aa, Unknown
  Description of Unknown: uncultivated organism sequence
  Category: MG90 effectors
  Description: MG90-55 effector
MFDKKKTDDLRCSICGRHKNDTEVLVDTGQGILICDRCVKGLMKAMGIEAPAKSPADATAATGSEAAAAGEKKTAQEPAAPELEGKLPTPQELYAHLNNYVIGQEKAKRVLSVAVYNHYKRLRHANDDGVELSKSNVLLVGPTGSGKTLLAQTLARGLNVPFAIADATTLTEAGYVGEDVENIIHKLLQAADGNVERAQRGIVYLDEIDKIARKSENPSITRDVSGEGVQQALLKLVEGTLCNVPAAGGRKNPRGQMIAVDTSNILFICGGAFDGLEKIVRRRSVKSGIGFSAQVKSEKEESLSELLQDVEPSDLVKYGLIPELVGRLPVIAVLQELTEEGFVSILTEPRNALIKQFKELFAMEGVELEVTADALKAIAHKAMERKTGARGLRSIVEAALLDAMFEVPAKPEIGRVVLDKATIETGAPVDMIACPRKDPVKPEASQAS

SEQ ID NO: 2733 - protein, 448 aa, Unknown
  Description of Unknown: uncultivated organism sequence
  Category: MG90 effectors
  Description: MG90-56 effector
MFDKKKTDDLRCSICGRHKNDTEVLVDTGQGILICDRCVKGLMKAMGIEAPAKSPADATAATGSEAAAAGEKKTAQEPAAPELEGKLPTPQELYAHLNNYVIGQEKAKRVLSVAVYNHYKRLRHANDDGVELSKSNVLLVGPTGSGKTLLAQTLARGLNVPFAIADATTLTEAGYVGEDVENIIHKLLQAADGNVERAQRGIVYLDEIDKIARKSENPSITRDVSGEGVQQALLKLVEGTLCNVPAAGGRKNPRGQMIAVDTSNILFICGGAFDGLEKIVRRRSVKSGIGFSAQVKSEKEASLSELLQDVEPSDLVKYGLIPELVGRLPVIAVLQELTEEGFVSILTEPRNALIKQFKELFAMEGVELEVTAGALKAIAHKAMERKTGARGLRSIVEAALLDAMFEVPAKPEIGRVVLDKATIETGAPVDMIACPRKDPVKPEASQAS

SEQ ID NO: 2734 - protein, 411 aa, Unknown
  Description of Unknown: uncultivated organism sequence
  Category: MG90 effectors
  Description: MG90-57 effector
MFETKVPLRRCSFCGRDQTKVEALITGPGGVAICNYCIDECYEMIHQEREKKENSPVSIDRLPTPREIKEFLDQYVIGQDEAKKVLSVAVYNHYKRIMSGKDTDDVEIEKSNILLIGPTGSGKTLLARSLAKLLDVPFAIADATTLTEAGYVGEDVENILLRLIQAADYDIEKAERGIIYIDEIDKISRKSENPSITRDVSGEGVQQALLKILEGTIANVPPQGGRKHPHQQYIQIDTTNILFICGGAFVGLEDIIARRIGKGSMGFTADVDKKKLNRDELLKHVEPDDLVKFGLIPELIGRLPVIATLSELKEEDLVRVLKEPKNSLVKQYKKLLELEGVELEFTDDALRAIAKEAIRRKTGARGLRAIMEKIMTDVMFEVPTRKDVRKVIIDAESVKTGKPKYELVKAS

SEQ ID NO: 2735 - protein, 474 aa, Unknown
  Description of Unknown: uncultivated organism sequence
  Category: MG90 effectors
  Description: MG90-58 effector
MKDYEEVKDTKDITEETEHKDDYEDVCYLCRRPESKAGKLIRLPMEGICICPDCMQRSFTMMGNTNINYEDLMKNMNLQDMFPGNIQDGIPKSQRLKKKKPKEKNEPVIDLKQILPPHQIKARLDDYVIGQDYAKKVMSVAVYNHYKRVATNTMDEIEIEKSNMLMIGPTGCGKTYLVRTLARLLDVPLAIADATSLTEAGYIGDDIESVVSKLLAAADNDVEKAERGIIFIDEIDKIAKKKNTTSRDVSGESVQQGLLKLLEGSDVEVPVGASSKNAMVPLTTVNTRNILFICGGAFPDLDGIIKARLNKTSGIGFGAMLSDAHDQDSDIVSQVTIDDLREFGMIPEFIGRLPVIFTLKGLDEAALVKILKEPKNAIIKQYQKLLALDEVDLQFDDGALEAIAKRAIEKKTGARALRSIIEELMLDIMYQIPKDDNIGRVTITQPYVEHRGGPLIEMRGIFSLPNKTPVAGIE

SEQ ID NO: 2736 - protein, 448 aa, Unknown
  Description of Unknown: uncultivated organism sequence
  Category: MG90 effectors
  Description: MG90-59 effector
MFDKKKTDDLRCSICGRHKNDTEVLVDTGQGILICDRCVKGLMKAMGIEAPAKSPADATAATGSEAAAAGEKKTAQEPAAPELEGKLPTPQELYAHLNNYVIGQEKAKRVLSVAVYNHYKRLRHANDDGVELSKSNVLLVGPTGSGKTLLAQTLARGLNVPFAIADATTLTEAGYVGEDVENIIHKLLQAADGNVERAQRGIVYLDEIDKIARKSENPSITRDVSGEGVQQALLKLVEGTLCNVPAAGGRKNPRGQMIAVDTSNILFICGGAFDGLEKIVRRRSVKSGIGFSAQVKSEKEESLSELLQDVEPSDLVKYGLIPELVGRLPVIAVLQELTEEGFVSILTEPRNALIKQFKELFAMEGVELEVTSGALKAIAHKAMERKTGARGLRSIVEAALLDAMFEVPAKPEIGRVVLDKATIETGAPVDMIACPRKDPVKPEASQAS

SEQ ID NO: 2737 - protein, 448 aa, Unknown
  Description of Unknown: uncultivated organism sequence
  Category: MG90 effectors
  Description: MG90-60 effector
MFDKKKTDDLRCSICGRHKNDTEVLVDTGQGILICDRCVKGLMKAMGIEAPAKSPADATAATGSEAAAAGEKKTAQEPAAPELEGKLPTPQELYAHLNNYVIGQEKAKRVLSVAVYNHYKRLRHANDDGVELSKSNVLLVGPTGSGKTLLAQTLARGLNVPFAIADATTLTEAGYVGEDVENIIHKLLQAADGNVERAQRGIVYLDEIDKIARKSENPSITRDVSGEGVQQALLKLVEGTLCNVPAAGGRKNPRGQMIAVDTSNILFICGGAFDGLEKIVRRRSVKSGIGFSAQVKSEKEESLSELLQDVEPSDLVKYGLIPELVGRLPVIAVLQELTEEGFVSILTEPRNALIKQFKELFAMEGVELEVTAGALKAIAHKAMERKTGARGLRSIVEAALLDAMFEVPAKPEIGRVVLDKATIETGAPVDMIACPRKDPVKPEASQAS

SEQ ID NO: 2738 - protein, 448 aa, Unknown
  Description of Unknown: uncultivated organism sequence
  Category: MG90 effectors
  Description: MG90-61 effector
MFDKKKTDDLRCSICGRHKNDTEVLVDTGQGILICDRCVKGLMKAMGIEAPAKSPADATAATGSEAAAAGEKKTAQEPAAPELEGKLPTPQELYAHLNNYVIGQEKAKRVLSVAVYNHYKRLRHANDDGVELSKSNVLLVGPTGSGKTLLAQTLARGLNVPFAIADATTLTEAGYVGEDVENIIHKLLQAADGNVERAQRGIVYLDEIDKIARKSENPSITRDVSGEGVQQALLKLVEGTLCNVPAAGGRKNPRGQMIAVDTSNILFICGGAFDGLEKIVRRRSVKSGIGFSAQVKSEKEASLSELLQDVEPSDLVKYGLIPELVGRLPVIAVLQELTEEGFVSILTEPRNALIKQFKELFAMEGVELEVTAGALKAIAHKAMERKTGARGLRSIVEAALLDAMFEVPAKPEIGRVVLDKATIETGAPVDMIVCPRKDPVKPEASQAS

SEQ ID NO: 2739 - protein, 448 aa, Unknown
  Description of Unknown: uncultivated organism sequence
  Category: MG90 effectors
  Description: MG90-62 effector
MFDKKKTDDLRCSICGRHKNDTEVLVDTGQGILICDRCVKGLMKAMGIEAPAKSPADATAATGSEAAAAGEKKTAQEPAAPELEGKLPTPQELYAHLNNYVIGQEKAKRVLSVAVYNHYKRLRHANDDGVELSKSNVLLVGPTGSGKTLLAQTLARGLNVPFAIADATTLTEAGYVGEDVENIIHKLLQAADGNVERAQRGIVYLDEIDKIARKSENPSITRDVSGEGVQQALLKLVEGTLCNVPAAGGRKNPRGQMIAVDTSNILFICGGAFDGLEKIVRRRSVKSGIGFSAQVKSEKEASLSELLQDVEPSDLVKYGLIPELVGRLPVIAVLQELTEEGFVSILTEPRNALIKQFKELFAMEGVELEVTADALKAIAHKAMERKTGARGLRSIVEAALLDAMFEVPAKPEIGRVVLDKATIETGAPVDMIACPRKDPVKPEASQAF

SEQ ID NO: 2740 - protein, 448 aa, Unknown
  Description of Unknown: uncultivated organism sequence
  Category: MG90 effectors
  Description: MG90-63 effector
MFDKKKTDDLRCSICGRHKNDTEVLVDTGQGILICDRCVKGLMKAMGIEAPAKSPADATVATGSEAAAAGEKKTAQEPAAPELEGKLPTPQELYAHLNNYVIGQEKAKRVLSVAVYNHYKRLRHANDDGVELSKSNVLLVGPTGSGKTLLAQTLARGLNVPFAIADATTLTEAGYVGEDVENIIHKLLQAADGNVERAQRGIVYLDEIDKIARKSENPSITRDVSGEGVQQALLKLVEGTLCNVPAAGGRKNPRGQMIAVDTSNILFICGGAFDGLEKIVRRRSVKSGIGFSAQVKSEKEASLSELLQDVEPSDLVKYGLIPELVGRLPVIAVLQELTEEGFVSILTEPRNALIKQFKELFAMEGVELEVTADALKAIAHKAMERKTGARGLRSIVEAALLDAMFEVPAKPEIGRVVLDKATIETGAPVDMIACPRKDPVKPEASQAS

SEQ ID NO: 2741 - protein, 448 aa, Unknown
  Description of Unknown: uncultivated organism sequence
  Category: MG90 effectors
  Description: MG90-64 effector
MFDKKKTDDLRCSICGRHKNDTEVLVDTGQGILICDRCVKGLMKAMGIEAPAKSPADATAATGSEAAAAGEKKTAQEPAAPELEGKLPTPQELYAHLNNYVIGQEKAKRVLSVAVYNHYKRLRHANDDGVELSKSNVLLVGPTGSGKTLLAQTLARGLNVPFAIADATTLTEAGYVGEDVENIIHKLLQAADGNVERAQRGIVYLDEIDKIARKSENPSITRDVSGEGVQQALLKLVEGTLCNVPAAGGRKNPRGQMIAVDTSNILFICGGAFDGLEKIVRRRSVKSGIGFSAQVKSEKEESLSELLQDVEPSDLVKYGLIPELVGRLPVIAVLQELTEEGFVSILTEPRNALIKQFKELFAMEGVELEVTAGALKAIAHKAMERKTGARGLRSIVEAALLDAMFEVPAKPEIGRVVLDKATIETGAPVDMIVCPRKDPVKPEASQAS

SEQ ID NO: 2742 - protein, 448 aa, Unknown
  Description of Unknown: uncultivated organism sequence
  Category: MG90 effectors
  Description: MG90-65 effector
MFDKKKTDDLRCSICGRHKNDTEVLVDTGQGILICDRCVKGLMKAMGIEAPAKSPAAASAATGSEAVAAGEMKSAQEPAAPELEGKLPTPQELYAHLNNYVIGQEKAKRVLSVAVYNHYKRLRHANDDGVELSKSNVLLVGPTGSGKTLLAQTLARGLNVPFAIADATTLTEAGYVGEDVENIIHKLLQAADGNVERAQRGIVYLDEIDKIARKSENPSITRDVSGEGVQQALLKLVEGTLCNVPAAGGRKNPRGQMIAVDTSNILFICGGAFDGLEKIVRRRSVKSGIGFSAQVKSEKEESLSELLQDVEPSDLVKYGLIPELVGRLPVIAVLQELTEEGFVSILTEPRNALIKQFKELFAMEGVELEVTAGALKAIAHKAMERKTGARGLRSIVEAALLDAMFEVPAKPEIGRVVLDKATIETGAPVDMIACPRKDPVKPEASQAF

SEQ ID NO: 2743 - protein, 428 aa, Unknown
  Description of Unknown: uncultivated organism sequence
  Category: MG90 effectors
  Description: MG90-66 effector
MAKQEPQHIKCSLCQRDITVHDQYDLPIYDPRSGFAICKSCIREIYHFIEENDHQEAIVQQKDFAMTLDAKLAKIKPHIIKQYLDEYIINQERAKKILSVAVYNHYKRMKYCYLHEDETEIEKSNVIMLGPSGCGKTALLSHLATLLDIPFAVTDASSLTEAGFVGADVEVAVRNLYYAADKNTEKAEHGIIYLDEFDKIARKSGENNSITADPGHEGVQQALLKMLEGSVVEFTARGQRKHPEAPTIKVDTRNILFIVGGAFVGIEKIIAKRLKNTDTNIGFGAKVPSKEEKPKFDELIHKVRPEDLMKFGIIPEIIGRLPVICTLETLDEDALLRILTEPKNAPVKQYEKLLAMDNVQLEFSDTALRAVARKAIERKTGARSLKGIIEDVMLDIMFDIPKSDAKRKVTITEECLEKGENPKIEEIA

SEQ ID NO: 2744 - protein, 372 aa, Unknown
  Description of Unknown: uncultivated organism sequence
  Category: MG90 effectors
  Description: MG90-67 effector
MVSNAPEPEEEIIDLPKPSEIKAYLDQYVIGQEEAKMIISVAVYNHYKRIFSRKDDDIDLEKSNILMIGPTGCGKTLIAETLARFLKVPFAISDATTLTEAGYVGEDVENILVRLLQAADYDVAKAEKGIVYIDEIDKISRKSETPSITRDVSGEGVQQALLKILEGTKVNVPPKGGRKHPQQDFIEMDTKNILFIAGGAFFGLEKIIKERIDKKAIGFDVKLGTNIDEANIFDQTISQDLLKYGLIPELIGRMPVLCTLHELTEEALVEILVKPKNALCSQYKKYFELDGVELEFGEDALREIARIAINQKTGARGLRSIMEKFMLKIMYNIPDLDNIRSCHITADVVSKGAEPEFVFSSKSSNKRAAITR

SEQ ID NO: 2745 - protein, 475 aa, Unknown
  Description of Unknown: uncultivated organism sequence
  Category: MG90 effectors
  Description: MG90-68 effector
MKDYEEEVKDTKDDAGENERKDDYEDICYMCRRPESKAGKLIHLPMEGICICPDCMQRSFTAMTNTNINYEDLMRNMNFQDMFPGNIQDGIPKSQRLKKKKPKENKEPAIDLKAILPPHQIKARLDDYVIGQDYAKKVMSVAVYNHYKRVATNTMDEIEIEKSNMLMIGPTGCGKTYLVRTLARLLDVPLAIADATSLTEAGYIGDDIESVVSKLLAAAGNDVEKAERGIIFIDEIDKIAKKKNTTSRDVSGESVQQGLLKLLEGSDVEVPVGASSKNAMVPLTTVNTRNILFICGGAFPDLEGIIKARLNKTSGIGFEAALNDAHDQDPEIMSQVTIDDLREFGMIPEFIGRLPVIFTLKGLDEKALVKILKEPKNAIIKQYQKLLALDEVDLQFDDEALEAIAKRAIQKKTGARALRSIIEELMLDIMYQIPKDDNIGRVTITEPYVEHTGGPLIEMRGVLTLPNKTPVAGIE

SEQ ID NO: 2746 - protein, 360 aa, Unknown
  Description of Unknown: uncultivated organism sequence
  Category: MG90 effectors
  Description: MG90-69 effector
MDSYVIGQDEAKKVLSVAVYNHYKRVLAGNDLDVELQKSNILMLGPTGSGKTYLAQTLAKILNVPFAIADATTLTEAGYVGEDVENILLKLIQAADYDIEKAQYGIVYIDEIDKITKKSENVSITRDVSGEGVQQALLKILEGTVASVPPQGGRKHPHQELLQIDTTNVLFICGGAFDGLEKIIENRMDQKAIGFNSEITDNTEMNNDALFGEVMPQDLVKFGIIPEFIGRVPVTVALKSLDENALVEILTKPKNAIVKQYEKLFELDGVKLTFTDEALKTIAKKSFERKTGARGLRAIMEQTVLDVMYETPSDETIEECIINEDVVNQLADPELKYKNNLDAKIKRANKKAKNEQIQPA

SEQ ID NO: 2747 - protein, 404 aa, Unknown
  Description of Unknown: uncultivated organism sequence
  Category: MG90 effectors
  Description: MG90-70 effector
MFSGIDGYICDDCVDRCSELLDDENYGWDKEEQFSDINLLKPKEIREFLDQYVIGQDAAKKVLSVAVYNHYKRITSGQKSEVEIQKSNILMLGPTGSGKTYLAQTLARLLNVPFAIADATTLTEAGYVGEDVENILLKLIQAADNNVARAEYGIIYIDEIDKISKKSENVSITRDVSGEGVQQALLKILEGTNASVPPQGGRKHPQQELIPINTTNILFICGGAFDGLEKIIERRLGSGGIGFNSEVVEKHSRGIDELFRQVMPQDLMKFGLIPELIGRVPVTVSLDLLDEDALVRILTEPKNALTKQYKSLFEMDGVKLEFTEDAIREVAHQAVERKTGARGLRAIMEDVMMDIMYEIPSDPSIGICTVTREAVLKQKQPEIVYRDLAAAGRPAGRVSGGVTA

SEQ ID NO: 2748 - protein, 448 aa, Unknown
  Description of Unknown: uncultivated organism sequence
  Category: MG90 effectors
  Description: MG90-71 effector
MFDKKKTDDLRCSICGRHKNDTEVLVDTGQGILICDRCVKGLMKAMGIEAPAKSPADATAATGSEAAAAGEKKTAQEPAAPELEGKLPTPQELYAHLNNYVIGQEKAKRVLSVAVYNHYKRLRHANDDGVELSKSNVLLVGPTGSGKTLLAQTLARGLNVPFAIADATTLTEAGYVGEDVENIIHKLLQAADGNVERAQRGIVYLDEIDKIARKSENPSITRDVSGEGVQQALLKLVEGTLCNVPAAGGRKNPRGQMIAVDTSNILFICGGAFDGLEKIVRRRSVKSGIGFSAQVKSEKEASLSELLQDVEPSDLVKYGLIPELVGRLPVIAVLQELTEEGFVSILTEPRNALIKQFKELFAMEGVELEVTADALKAIAHKAMERKTGARGLRSIVEAALLDAMFEVPAKPEIGRVVLDKATIETGAPVDMIVCPRKDPVKPEASQAS

SEQ ID NO: 2749 - protein, 379 aa, Unknown
  Description of Unknown: uncultivated organism sequence
  Category: MG90 effectors
  Description: MG90-72 effector
MDIIREEHKTTLVKSRDGVPTPRDICTVLDDYVIGQPHAKRVLSVAVHNHYKRLAHGQKNNDVEISKSNILLVGPTGCGKTLLAQTLARIIDVPFTMADATTLTEAGYVGEDVENIILRLLQAADYNVERAQRGIVYIDEVDKISRKSENPSITRDVSGEGVQQALLKIMEGTIASVPPQGGRKHPQQEFLQVDTTNILFICGGAFAGLEKIISQRSRGTSIGFGADVRGVDERQTGEILRGVEPEDLLKFGLIPEFIGRLPVIATLSDLDENTLVEILIRPKNALLKQYQRLFEMEGVHLEFADDALRSVARRAIAHKTGARGLRSIMEGILLDSMFELPTMSGVDEIVINREVVEGRASPLQIYADRRGDNVGGSSA

SEQ ID NO: 2750 - protein, 363 aa, Unknown
  Description of Unknown: uncultivated organism sequence
  Category: MG90 effectors
  Description: MG90-73 effector
MVSPTPVKAGAKAAKPAADSRKKLTPKAIHAYLDQYVIGQDRAKKVLSVAVYNHYKRLENNLDAIDSQVELEKSNILLAGPTGTGKTLLARTIARLLDVPFTIVDATVLTEAGYVGEDVESILSRLLEQADYDVARTERGIVFIDEIDKVARKSDNPSITRDVSGEGVQQAMLKLLEGNVVNVPPKGGRKHPEQDFVHINTQNILFICGGAFEGIERRIAQRLNTQVIGFDSAAKQQVDKENLLQYVSQEDFRAYGLIPEIIGRLPVITYLDPLDEDALKRILVEPKNALIKQYEKMFEMDGKKLVVEPEVLDFIVKTAVEKKIGARGLRSICEKIFTEAMYEAPSSQQAVYTVTLDFARKAI

SEQ ID NO: 2751 - protein, 442 aa, Unknown
  Description of Unknown: uncultivated organism sequence
  Category: MG90 effectors
  Description: MG90-74 effector
MMFQDPTTGTALCFSCAQKMMAMAAAKQRYENNGVSELEREQAAAAKLQLHREEAKQLFEIMSNESPAKIKAHLDKYIIGQDGAKKVLSVAVYNHYKRLAFFEAQKCKELETGKKIEGLAQLDKSNILMLGPTGVGKTAILKAIALYLGVPFTVVDSSTLTQSGYVGSDPETCVRQLWEEAGKDREKTERGIIFLDEFDKIARKSGTNRSTSADPGHEGVQQALLKIVEGTKVHFTLGNRKHPDAQTIEVDTTNILFVCGGAFEGIEKIIAKRVETGNGFGYTHVDKLGLDELKDEADRFNRLIEEATPDDVKEYGIIPEMLGRLPIMCKLHQLKENDLIRILTEPKNAIIKQFAVLFDMDGCRLKPDREALKEIARKAIKTGTGARSLRTIIEGILLDTMYDLPQISEQAAEGTKPVIHLTGEAVKTKKLSVEYVKAPMAA

SEQ ID NO: 2752 - protein, 411 aa, Unknown
  Description of Unknown: uncultivated organism sequence
  Category: MG90 effectors
  Description: MG90-75 effector
MFETNIPERRCSFCGRGQNEVEALITGPKGVAICNVCVDECYKMLHEKEEKRKGAPVKVDRLPTPKEIKEFLDQYVIGQEEAKKVLSVAVYNHYKRIMSGGTVDDVELEKSNILLIGPTGSGKTLLARSLAKLLDVPFAIADATTLTEAGYVGEDVENILLRLIQAADYDIEKAERGIIYIDEIDKIARKSENPSITRDVSGEGVQQALLKILEGTIANVPPQGGRKHPHQQYIQIDTSNILFICGGAFVGLEDIIARRIGKGAMGFTADVDKKKMERDELLKHVEPDDLVKFGLIPELIGRLPVIATLKELSEEDLVRVLTEPKNALVKQYKKMLELEGVELEFTEDALREIAREAIRRKTGARGLRAIMEKLMTDVMFEVPTRKDVKKVIIDAEAVKTGKPKYELTKAS

SEQ ID NO: 2753 - protein, 532 aa, Unknown
  Description of Unknown: uncultivated organism sequence
  Category: MG90 effectors
  Description: MG90-76 effector
MENYHKETHCSFCGKSESEVETIINGPNGMTICNECIETCEYILNKGKSADNSGLSLYTPKEIKAKLDEYIIGQDSAKRVLSVAVYNHYKRISQLGEKKKNDGVVIEKSNVLLLGPTGSGKTLLAKTLAQILNVPFAVADATTLTEAGYVGEDVENILLKLIQSANGDLKRAEIGIVYIDEYIIGQDSAKRVLSVAVYNHYKRISQLGEKKKNDGVVIEKSNVLLLGPTGSGKTLLAKTLAQILNVPFAVADATTLTEAGYVGEDVENILLKLIQSANGDLKRAEIGIVYIDEIDKIAKKGENVSITRDVSGEGVQQALLKIIEGTVANVPPQGGRKHPNQECYQLDTTNILFLCGGAFVDLDKIIDQRKDNSKLGFGSAVKGTVDYRYDELIEALQPADLIKYGLIPEFVGRVPIVVGLNALDENALVKILSEPKNALVKQYKYQFELDGVDLEFEDDALRAVAAKAIQLNTGARGLRAILEDVLLELMFEIPSDGDIEKVIVTKGAIEKTEKPIVVRAQGVKGETANNIA

SEQ ID NO: 2754 - protein, 412 aa, Unknown
  Description of Unknown: uncultivated organism sequence
  Category: MG90 effectors
  Description: MG90-77 effector
MFETKIPERRCSFCGRGQSEVEALITGPKGVAICNLCVDECYKMLHEESERKKKGAPVGVEKLPTPKEIKEFLDQYVIGQEEAKKVLSVAVYNHYKRIMSGGNVDDVELEKSNILLIGPTGSGKTLLARSLAKFLDVPFAIADATTLTEAGYVGEDVENILLRLIQAADYDIEKAERGIIYIDEIDKIARKSENPSITRDVSGEGVQQALLKILEGTIANVPPQGGRKHPHQQYIQIDTSNILFICGGAFVGLEDIIARRIGKGAMGFTADVDKKKMERDELLKHVEPDDLVKFGLIPELIGRLPVIATLKELKEEDLVRVLTEPKNALVKQYQKMLELEGVELEFTEDALREIAKEAIRRKTGARGLRAIMEKLMTDVMFEVPTRKDIKKVIIDAESVKTGKPKYELTKAS

SEQ ID NO: 2755 - protein, 350 aa, Unknown
  Description of Unknown: uncultivated organism sequence
  Category: MG90 effectors
  Description: MG90-78 effector
MKIPTPKELKAFLDEHVIGHDEVKKVLAVAVHNHYRRLEAAFSREANPEFADVEIEKSNILLIGPTGTGKTLLAKTLAKLLGVPFAIGDATVLTQAGYVGEDVENLVRYLYVNAGEDVQLAQTGIIYVDEIDKIASKTDNVSITRDVSGEGVQQALLKIIEGSTCRLPPKGGRKHPDQEYVEVDTRNILFICGGAFVGLDKIVAARTGKHTIGFGGEDSAQADSELIAKDVRPEDLVKFGLIPEFTGRLPIIATMGELTEDQLVDVLTKPKNALVKQYQKLLAMDGVKLEFEEDALRELAKMALKRKTGARGLRAEMERLMTDVMYEAPGNPKLKKVTVTAKLIKEKLCK

SEQ ID NO: 2756 - protein, 411 aa, Unknown
  Description of Unknown: uncultivated organism sequence
  Category: MG90 effectors
  Description: MG90-79 effector
MFETNIPERRCSFCGKAQSEVEALITGPKGVAICNQCVDECYKLLHEKEERKKGAPVKVEKLPTPKEIKEFLDQYVIGQEEAKKVLSVAVYNHYKRIMSGGNVDDVELEKSNILLIGPTGSGKTLLARSLAKLLDVPFAIADATTLTEAGYVGEDVENILLRLIQAADYDIEKAERGITYIDEIDKIARKSENPSITRDVSGEGVQQALLKILEGTIANVPPQGGRKHPHQQYIQIDTSNILFICGGAFVGLEDIIARRIGKGAMGFTADVDKKKMERDELLKHVEPDDLVKFGLIPELIGRLPVIATLKELTEEDLVRVLTEPKNALVKQYKKMLELEGVELEFTEDALREIAREAIRRKTGARGLRAIMEKIMTDVMFEVPTRKDIKKVIIDAESVKTGKPKYELTKAS

SEQ ID NO: 2757 - protein, 402 aa, Unknown
  Description of Unknown: uncultivated organism sequence
  Category: MG90 effectors
  Description: MG90-80 effector
MQTVRYNYRLYPTKTQETVLNRLFGCCRVVYNDTIDFFNNNFNPNNQSKLPTVSKASKQILTNAKKTTKRAFLKEVSSVALQQELRNAWLACLHGVSHSSNQKPAKRKTKKHNPVNSANFTGNSFIVKQHGVYIQKIGVIKTKWSRPMPSEPTSCTISHARNGRWYASFVVKRPKTPFAQCDNNAGIDMGLTDMATIVNTKGKRWKIANPRNYAKLQDKISRLQRHLSKQTKGSKRYERTRHQIALLYSKAHDALADYQWKNVLNIIRETQAIGVETLNIQGMTAKHGKSVRDAAMRSFLNKLGSKAEEHCRIIIQLNQWLATTKVCALCKHKLKAGIPEYARHWVCPNCGAHLDRDYNAALNILDAAGLAGSLNARGGGVRSFLASAENGCSRRTAYHPSF

SEQ ID NO: 2758 - protein, 394 aa, Unknown
  Description of Unknown: uncultivated organism sequence
  Category: MG90 effectors
  Description: MG90-81 effector
MEEGSADKGHVTIVYPAYPNVGQERELLRTLGVVRGLYNHFLAESIADVMEGDRFPTPREMNKAITVMRGRDIGLGSVAVFTLRDAPLRVHAAMTSFAKLSARSGELRLPRFKSESRYRSLAFDPKGVKFDGRRIVFGKWVKLRCGNLDRNRKLHRPEGGRIVTARIVRKGSGRWYVHITFEVDRRYRSEIDLSDPAEPEAYDLGLCDIITDSKGERIGAPDLYARHENEIARLQRQIASMEDGPKRRKKQRRLSVLHERIRRRRDGYLDEVADRMVSGHSAVILEDLRLRRMIERDDSPAPRRKLFTEAALGTLVRKVEAKAERACIPLVKVDPAYTTRRCSCCGHVGEKMPLSLRVFSCPRCGLEMDRDHNAALNILGSGMGTLRGSAEPSG

SEQ ID NO: 2759 - protein, 423 aa, Unknown
  Description of Unknown: uncultivated organism sequence
  Category: MG90 effectors
  Description: MG90-82 effector
MAEEIKESVCSFCGKHYTDNDKTILFTADTPGALICYDCAKEIYSNYKDKIDSMREVSGSVQADQKWTPQSMKEYLDQYIIGQEKAKEILCTAVYNHYQILKMREDGNKDAVEVEKSNVIMAGPTGVGKTAIIKRLAKIMQVPCVIADSTSLTSAGYVGDDVESVIQSLLIEADYDVEKAQKGIVYLDEIDKTNRHGENPSTTADPGHEGTQQALLKLIEGTVANVPLKGQRKHPNADMVKVDTSNILFIVGGAFEGIEKIITRRHNSGMAGVGFGSVLVNDKDKKKSYNEIIGDLRVEDLKKFGMTPELLGRLPVICPMKELTEEQLVEILSKPKNSLLKQYQTLFKAQGVDLTFDDEALKTVAHLAIERKTGARGLRGIMENILSHEMYSIPSDDSIGSVTVTGKDFEIIRGEKPAEKVSA

SEQ ID NO: 2760 - protein, 432 aa, Unknown
  Description of Unknown: uncultivated organism sequence
  Category: MG90 effectors
  Description: MG90-83 effector
MAILDCVCSFCGNVIPDDISCVQGIGNTYICEPCARKVISSLNMTNTFLENEEKTKNMDAPEAFRLPHPAQIKAHLDKYIIGQEKAKEVLSVAVYNHYKMLAIKARRNAETNNTKKNMVELEKSNCLLIGPTGSGKTALIRVLAKILKVPLTIADATSYTSSGYVGKDCETILRDLLTAANGELERAERGIVYINEIDKTSRKGENMSITSDPGHEGLQQALLKLLEGSTVEVPISGRRLNPENGNSVMINTENILFIVGGAFEGIEKIIARRIRKESSAGTMGFGSQLIDKKNQKFNEFIERVTTEDLRKFGMLPEILGRLPVIAPLKELAEDELVNILYRPRNALVKQYQELLRHDGIDLEVTPLALHAIAREAIKKKTGARGLRGIMEDTLMDVMFKAPDRDENSIVIDADNHGKIIVNFIQKKVKEAV

SEQ ID NO: 2761 - protein, 354 aa, Unknown
  Description of Unknown: uncultivated organism sequence
  Category: MG90 effectors
  Description: MG90-84 effector
MDELLKPAEIKSFLDQYVIGQDAAKRYLSVAVYNHYKRLLYAPKEDEVELDKSNIVLVGPTGTGKTLMARTIARLLKVPFTIVDATVLTEAGYVGEDVESILSRLLQVADYDVEQAERGIVFIDEIDKIARKGDNPSITRDVSGEGVQQALLKILEGTVVNVPPQGGRKHPEQKFIQVNTRNILFICGGAFDGIEKRIAQRLNTRAMGYGRVNADPIDRGNLMQYVTPQDLKSFGLIPELVGRLPVLTYMQPLDRAALRSILTEPKNAIVKQYERLFEMDGVKLTFDDAVLDYIVDKAVEFKLGARGLRSICEAVMMDTMFELPSTDRKKFTVTLSYAKKKIEKANFLDLKKVG

SEQ ID NO: 2762 - protein, 382 aa, Unknown
  Description of Unknown: uncultivated organism sequence
  Category: MG90 effectors
  Description: MG90-85 effector
MAPGSSASRAHVQPAAADLDINIMTPAEIKEGLDQYVIGQDEAKRVLSVSVYNHYKRILSGKGGDVELQKSNVLLLGPSGVGKTLLAQTLAKMLGVPFAIADATTLTEAGYVGEDVENILLKLIQAADFDVQKAQIGIIYIDEIDKITRKSENPSITRDVGGEGVQQALLKILEGTVSNVPPQGGRKHPQQEFIQIDTTNILFICGGAFDGLDKYILRRTDKSALGFGSALKDNSTEAERALLRKVEPHDLVKFGLIPELIGRLPVITVLDDLDEDALVRVLKEPRNSLVKQYKELLGMDNVELTFTDEALHAIARKTIERKTGARGLRSVMESILLPIMYEVPSDATIIRVTVDEDTVEGGEAHLEYGAVRKRYKNQAALS

SEQ ID NO: 2763 - protein, 427 aa, Unknown
  Description of Unknown: uncultivated organism sequence
  Category: MG90 effectors
  Description: MG90-86 effector
MEKEGKIYCDFCGKEIEPGEFGATGINGVFICQDCLKEFHESVMAQDTYLESEKKKQEREEVEKEDFQIPRPSMIKAHLDKYIEGQDYAKRVLSVAVYNHYKMLRAKHSGEYNNKDVELEKSNILLCGPTGSGKTAVLRALSKYLKVPFTMADITSYSSAGYVGKDVETIIRDLIVAADGDVKAAERGIVYIDEIDKTSRKGENLSTTSDPGHEGVQQALLKLLEGQMVEVPNKGRRLHPESNNTTMVNTANILFIVGGAFEGIEKIVSQRLHQHSSSMGFGAKLEDKKNHQYNDFIEKVTTEDFRKFGMLPELLGRVPVIAPMKQLSEEQLVHILYRPKNALVKQYQELLSQDNVDLKFTQKALKSIAHDAIKRKTGARGLRGIMEDILNPVMFEVPDKDVDAVVVDADDDDKIKIEYKDLKKEAV

SEQ ID NO: 2764 - protein, 416 aa, Unknown
  Description of Unknown: uncultivated organism sequence
  Category: MG90 effectors
  Description: MG90-87 effector
MGRQTVRYRYRIYPTRGQEWAANRLFGCCRVLYNDVIDLFRSRFDPSNRTLMPTQSQAQSMLIAQAKKTPERAWLTEVSNVALIQMFRDAWQSCWNGVRKDRRQRFARYRSLKHNPVNSARFTRNGFTVRPNGVYLAKIGTVKTKWSRRLPSTPSSCTLIHEPNGRWYVSFVVERGTTPLPENGVFAGIDMGLSDMAAVVTTDGRRWKIGNPRNYTLLQKRIVRLQKHLAGQEKGSRRYARTRKRIAMLYAKAHDMLDDYQNKNVLHIVRETQTVGVETLDVHGIAVSHGRSARDAAIRSFLNKLEWKSEQYGRTVKHIGRWEPSTRLCSQCKHYVDGGIPEHVRVWQCADCGTILDRDWNAALNILDAAGLAESLNARGGSVRPDLASAGNGGTRGSANPSERRNVPSRRGIPVL

SEQ ID NO: 2765 - protein, 367 aa, Unknown
  Description of Unknown: uncultivated organism sequence
  Category: MG90 effectors
  Description: MG90-88 effector
MRELIYRAKRMDAMLDFDKTPSQLKKGLDEYVVGQEEAKKILSVAVYNHYKRLRAEMRNVGDEEYPDVEIEKSNVLLIGPTGSGKTYLARTLAKMLNVPFAIGDATTVTEAGYVGEDVENLVLNLVRAADYNIERAQCGIVYIDEIDKICRKNENVSITRDVGGEGVQQALLKILEGTVCNIPPKGGRKHPDQQYLRVDTRNILFICGGAFVGLDKIIARRTESKVLGFNSDIAEDSKSEAQILKKVQPEDLVKFGFIPEFIGRLPVVCSLAGLTESDLVHILTKTKNSLIKQYSKLLSLDGAKLRFTDGAVKAIARKAMDFGTGARALRSIMESVMLNIMYELPDQKKSGEVVIDESMINSASRAE

SEQ ID NO: 2766 - protein, 411 aa, Unknown
  Description of Unknown: uncultivated organism sequence
  Category: MG90 effectors
  Description: MG90-89 effector
MFETNIPERRCSFCGRGQNDVEALITGPKGVAICNVCVDECYKMLHEKEEKKKGAPVKIDKLPTPKEIKEFLDQYVIGQEEAKKVLSVAVYNHYKRIMSGGTVDDVELEKSNILLIGPTGSGKTLLARSLAKLLDVPFAIADATTLTEAGYVGEDVENILLRLIQAADYDIEKAERGIIYIDEIDKIARKSENPSITRDVSGEGVQQALLKILEGTIANVPPQGGRKHPHQQYIQIDTSNILFICGGAFVGLEDIIARRLGKGAMGFTADVDKKKMERDELLKHVEPDDLVKFGLIPELIGRLPVIATLKELTEDDLVRVLTEPKNALVKQYKKMLELEGVELEFTEDALREIAREAIRRKTGARGLRAIMEKLMTDVMFEVPTRKDVKKVIIDAEAVKTGKPKYELTKAS

SEQ ID NO: 2767 - protein, 403 aa, Unknown
  Description of Unknown: uncultivated organism sequence
  Category: MG90 effectors
  Description: MG90-90 effector
MKRCSFCGREQSKVEALISGPGGVAICNYCVDECYELIHGEKQKKGAPVKIDKLPTPKEIKEFLDQYVIGQEEAKKVLSVAVYNHYKRIMSGGSVDDVELEKSNILLIGPTGSGKTLLARSLAKLLDVPFAIADATTLTEAGYVGEDVENILLRLIQAADYDIEKAERGIIYIDEIDKIARKSENPSITRDVSGEGVQQALLKILEGTVANVPPQGGRKHPHQQYIQIDTSNILFICGGAFVGLEDIIARRIGKGAMGFTADVDKKKMERDELLKYVEPDDLVKFGLIPELIGRLPVIATLKELKEEDLVRVLTEPKNALVKQYKKLLEMEGVELVFTEEALREIAREAIRRKTGARGLRAIMEKLMTDVMFEVPTRKDIKKVIIDAEAVKTGKPKYELTKAS

SEQ ID NO: 2768 - protein, 411 aa, Unknown
  Description of Unknown: uncultivated organism sequence
  Category: MG90 effectors
  Description: MG90-91 effector
MFETGIPERRCSFCGKGQSEVEALITGPKGVAICNQCVDECYKLLHEKEEKKKGAPVKVDKLPTPKEIKEFLDQYVIGQEEAKKVLSVAVYNHYKRIMSGGTVDDVELEKSNILLIGPTGSGKTLLARSLAKLLDVPFAIADATTLTEAGYVGEDVENILLRLIQAADYDIEKAERGIIYIDEIDKIARKSENPSITRDVSGEGVQQALLKILEGTIANVPPQGGRKHPHQQYIQIDTSNILFICGGAFVGLEDIIARRIGKGAMGFTADVDKKKMERDELLKHVEPDDLVKFGLIPELIGRLPVIATLKELTEEDLVRVLTEPKNALVKQYKKMLELEGVELEFTEDALREIAREAIRRKTGARGLRAIMEKLMTDVMFEVPTRKDVKKVIIDAEAVKTGKPKYELTKAS

SEQ ID NO: 2769 - protein, 453 aa, Unknown
  Description of Unknown: uncultivated organism sequence
  Category: MG90 effectors
  Description: MG90-92 effector
MSEFVDEMLGKMMGGHEPSDSNGSTARCSFCGKKGGKDSLLVMSRSSKGIFICKDCIDSYHMKLQEEEKSSTGAKNFQKTIEGQKARIAPPVRIKKFIDDYVIGQETAKKTIAVSIYNHYKMVNMKHDLAESGNKDAGLDLSKSNLLIVGPSGSGKTHLLRVVARMLNIPFVIEDACSFTASGYVGRDVETMLRDLVDAAGGNIKAAERGIIYIDEIDKISRKGENPSTTSDPGNEAVQQGLLKLIEGNVVEVPVKGQRNHPQAETIKVNTENILFIVGGSFEGIEKIISKRVHKSAGRIGFFGETRNMHEQFNDLILEISTDDLRKFGMLPEFLGRLPVICPMQELTEDELVRILTEPKDAIVRQYRMLMGADGITLEFTDEALRKVAKEAIERKVGARGLRSIIEKILRPIMYSAPTDNDLESVVIDAGTDSEENYKVIRNYRNTADAMEA

SEQ ID NO: 2770 - protein, 474 aa, Unknown
  Description of Unknown: uncultivated organism sequence
  Category: MG90 effectors
  Description: MG90-93 effector
MKDYEEVKDTKDITEETEPKDDYEDVCYLCRRPESKAGKLIRLPMEGICICPDCMQRSFTMMGNTNINYEDLMKNMNLQDMFPGNIQDGIPKSQRLKKKKPKEKNEPVIDLKQILPPHQIKARLDDYVIGQDYAKKVMSVAVYNHYKRVATNTMDEIEIEKSNMLMIGPTGCGKTYLVRTLARLLDVPLAIADATSLTEAGYIGDDIESVVSKLLAAADNDVEKAERGIIFIDEIDKIAKKKNTTSRDVSGESVQQGLLKLLEGSDVEVPVGASSKNAMVPLTTVNTRNILFICGGAFPDLDGIIKARLNKTSGIGFGAMLSDAHDQDSDIVSQVTIDDLREFGMIPEFIGRLPVIFTLKGLDEAALVKILKEPKNAIIKQYQKLLALDEVDLQFDDGALEAIAKRAIEKKTGARALRSIIEELMLDIMYQIPKDDNIGRVTITQPYVEHRGGPLIEMRGIFSLPNKTPVAGIE

SEQ ID NO: 2771 - protein, 690 aa, Unknown
  Description of Unknown: uncultivated organism sequence
  Category: MG90 effectors
  Description: MG90-94 effector
MKHLLNYKYEIFPTKPQREQLNRTFRQTKIQWNKAVTIRKKLKSALMSGQFEHVIKTYLSAAADKSNTSSNRKKAILKVQQSLPQIDFETAAKLYDIKNLVGKVLGELTPRHADIAFLVNELKTSHSKELAERKAAIANGATGKSLPKLKTYWQMITAIGQLAGFKAKTFMDDSFESPSGMALSAIRFNVSGTKNAVRWNQAVQPKPGQRTYGATGEPRYKRRSDGFAYQIHDAAPADLIRSKKKNGHQIHLKALHKGNAWVDFAYHRPVPVDDKIKQFTVMTKAGRYFIALSTEVPTSAWAIAPMEAGWHAGIDPGAQTALTVGLVNSTSGEIKHLAIHYEFLEKSLTKLETLQQALSLKQGPRRKRTEVEIQEALTQYSKKRAVQKLTNAEKEKTLAKERERLERRMVFQGASRKWRQGAKSVSSLMLKIANQRQDVLHKISRALAEGCDVVGIGHWEPEREVSFRKKLRLLKKQVKAGVAGATATLKEHIEEKSKEGPKGIKKRRRGGRDRSIATLRMLINEKAVRSGVKAFTDINESYSTMTCSSCGEATGPTGIVNLGIREWQCGNCNVSHHRDLNSAFNILKKTELELAAAQAAAPATGSTATRTDAQGAQSAPGSDAGSGYLATGHHGRGGSFFYEHAEVSLPDLWKEEVPRALKSLIQMGVVRALTLQRADEKSSKSPPAQT

SEQ ID NO: 2772 - protein, 426 aa, Unknown
  Description of Unknown: uncultivated organism sequence
  Category: MG90 effectors
  Description: MG90-95 effector
MNDIVDIDENQHYCCFCGKAISDEATVVQGDDNVLICFDCIKEIYEENIERVEQRKKNALINKLNKDVTPSSIKRYLDEYIIGQESAKKVLSVAVYNHYKSLRIKSKDNAVDLEKSNIILLGPSGCGKTAILKALSKFLNVPFAMADASTLTAAGYVGADVETVLQKLILEANGDIKKAQKGIVYIDEIDKIARKGENLSTTADPGHEGVQQALLKMIEGSVVSVPPKGQRNHPQADMIRIDTSNILFIVGGAFENIDKIVEKRIKSSKGSMGFNGVLKDTSKTYNDFIKEVRTEDLKKFGMLPELLGRLPIICPMEELDKKALIRILTEPKNALVKQYQAILQADNVKLSFTEKALEYIADKAIKRKTGARSLRSILEEELNQTMYELPDKKDITAVLVAVENNNICIEYIKEIEGVKIYDNICK

SEQ ID NO: 2773 - protein, 479 aa, Unknown
  Description of Unknown: uncultivated organism sequence
  Category: MG90 effectors
  Description: MG90-96 effector
MSDYKDKDELTKTEDTSSDHKKDDSHKEYEDICYVCRRPESKAGKMIHLPINNICVCADCMQKSFDTMNNSGMSDMMNMNNINFQDLMNFGMPMMGGPDMMPKSQKLKKKKPKEEAQPVFDIKKIPAPHVIKAQLDDYVIGQEYAKKVMSVAVYNHYKRVATNTMDDIEIEKSNMLMIGPTGCGKTYLVRTLAKLLDVPLAITDATTLTEAGYIGDDVESVVSKLLAAADNDVEKAERGIIFIDEIDKIAKKKNTTSRDVSGESVQQGLLKLLEGSDIEVPVGASSKNAMVPMTTVSTRNILFICGGAFPDLENIIKERLTQQSSIGFIADLKDKYDNDKNLISKVTIDDLRTFGMIPEFIGRLPVIFTLQGLSEDMLVKILKEPKNAILKQYQKLLALDEVDLQFSDDALTAIAAKAMEKKTGARALRSIIEEFMLDIMYEIPKDDNIGRVTITREYIENTGGPVIEMRGALPVTKNS

SEQ ID NO: 2774 - protein, 351 aa, Unknown
  Description of Unknown: uncultivated organism sequence
  Category: MG90 effectors
  Description: MG90-97 effector
MPKPKDIKEYLDQYIIGQDDAKRYMSVAVYNHYKRLAQANTDKKDQDDVEIEKSNIVMVGSTGTGKTLLARTIARLLDVPFTIVDATVFTEAGYVGEDVESILSRLLQVADYDVAKAERGIVFIDEIDKIARKADNPSITRDVSGEGVQQGLLKLLEGTMVNVPPKGGRKHPDQDYIHVDTRNILFICGGAFDGIEKRIAQRLNAHTVGYNSVQNAKKIDPKNLMKYVEPQDLKSFGLIPEIIGRLPVLTYLNPLDKEALTRILVEPKNSIVKQYIKLFAMDGVKLTFKQDALDYIVDKAVEFKLGARGLRSIVETIMMDAMFEIPSSGEKQFEVTKEYAENQMEKRGNLA

SEQ ID NO: 2775 - protein, 411 aa, Unknown
  Description of Unknown: uncultivated organism sequence
  Category: MG90 effectors
  Description: MG90-98 effector
MFETKIPMRRCSFCGRDQSKVEALITGPGGVAICNYCIDECYEMIHQEEERKGAPSISIDKLPTPKEIKEFLDQYVIGQDEAKKVLSVAVYNHYKRIMSGKDTDDVEIEKSNILLIGPTGSGKTLLARSLAKLLDVPFAIADATTLTEAGYVGEDVENILLRLIQAADYDIEKAERGIIYIDEIDKISRKSENPSITRDVSGEGVQQALLKILEGTIANVPPQGGRKHPHQQYIQIDTTNILFICGGAFVGLEDIIARRIGKGAMGFTADVDKKKLNRDELLKHVEPDDLVKFGLIPELIGRLPVVATLSELKEEDLVRVLKEPKNALVKQYKKLLELEGVELEFTDDALRAIAKEAIRRKTGARGLRAIMEKIMTDVMFEVPTRKDIKKVIIDADSVKTGKPKYELVKAS

SEQ ID NO: 2776 - protein, 424 aa, Unknown
  Description of Unknown: uncultivated organism sequence
  Category: MG90 effectors
  Description: MG90-99 effector
MENKIVCEMCGREIPAQTTVVQSIKGQVFCADCISKCYKALKNMEPHIEKAEKTRDLDTKAVKLAKPTELKKYLDGFIEGQEKAKQVLSVAIYNHYKKLVMRASGKATKGIELEKSNVLLIGPSGCGKTAILRSLAKALKVPFVMADATAYSSSGYVGRDVEMIIRDLLNAAGGDVEAAERGIVYIDEIDKIGRKGENVSTTADPGHEGVQQAILKLLEGSVLEIPDKGQRVHPDAKMTRVNTENILFIVGGAFEGIEKIIAARLRKQLDAGTMGFGSQLVDTKNQRFNEFIEQVTTDDLKKFGMLPEVLGRVPIIAPMKELSEEQLVHILYHPKNALIRQYKELLSYDNVVLDVTEEAMRAIAKEAIARKTGARGLRGIMEEILGPVMFSAPDRGEDITLDVDKDGKIAVIYQKHEDVKREAV

SEQ ID NO: 2777 - protein, 403 aa, Unknown
  Description of Unknown: uncultivated organism sequence
  Category: MG90 effectors
  Description: MG90-100 effector
MSILEDESSLANRKTGYERETQAKILPKPQEIKKQLDNYVIGQEQAKIALSVAVYNHYKRIYFGKSDDVELSKSNVLLLGPTGVGKTMLAQTLARILDVPFAIADATTLTEAGYVGEDVENILLRLIQAADFNIELAERGIIYIDEIDKIARKSENPSITRDVSGEGVQQALLKILEGTVSNVPPQGGRKHPHQEFIQVNTKNILFICGGAFDGLEKIIERRLDQKSIGFGANVQGKKDKDISKILHEVQPHDLLKFGIIPELVGRLPVIASLNALKREDLVRILTEPKNALVKQYKKLMEYDEVELEFQPEALEAIADKAIERNIGARGLRAVMEGILTPMMYDIPSDPTVVKAVITKDCVEGRSGPELTHDPKKINYSVKLNTGKGEGRPASGSSTPASAS

SEQ ID NO: 2778 - protein, 423 aa, Unknown
  Description of Unknown: uncultivated organism sequence
  Category: MG90 effectors
  Description: MG90-101 effector
MAEEIKESVCSFCGKHYTDNDKTILFSADTPGALICYDCAKEIYSNYKDKIDSMREVSGSVQADQKWTPQSMKEYLDQYIIGQEKAKEILCTAVYNHYQILKMREDGNKNAVEVEKSNVIMAGPTGVGKTAIIKRLAKIMQVPCVIADSTSLTSAGYVGDDVESVIQSLLIEADYDVEKTQKGIVYLDEIDKTNRHGENPSTTADPGHEGTQQALLKLIEGTVANVPLKGQRKHPNADMVKVDTSNILFIVGGAFEGIEKIITRRHNSGMAGVGFGSVLVNDKDKKKSYNEIIGDLRVEDLKKFGMTPELLGRLPVICPMKELTEEQLVEILSKPKNSLLKQYQTLFKAQGVDLTFDDEALKTVAHLAIERKTGARGLRGIMESILSHEMYSIPSDDSIGSVTVTGTDFEIVRGEKPAEEISA

SEQ ID NO: 2779 - protein, 354 aa, Unknown
  Description of Unknown: uncultivated organism sequence
  Category: MG90 effectors
  Description: MG90-102 effector
MEELLKPAQIKDFLDQYVIGQDDAKRYMAVAVYNHYKRLLYAPKEDEVEIDKSNIVLVGPTGTGKTLMARTIAKLLNVPFTIVDATVLTEAGYVGEDVESILSRLLQVADYNVEQAERGIVFIDEIDKIARKGDNPSITRDVSGEGVQQALLKILEGTTVNVPPQGGRKHPDQKFIQVDTRNILFICGGAFDGIERKIAQRLNTRAMGYGRAGADPIDRSNLMQYVMPQDLKSFGLIPELVGRLPVLTYMQPLGREALRSILTEPKNAIVKQYVRLFEMDGVKLAFDDEVLDYIVDRAIVYKLGARGLRSICEAVMMDTMFDIPSSGCKEFRVTLPYAKEKIEKANFVELKKVG

SEQ ID NO: 2780 - protein, 439 aa, Unknown
  Description of Unknown: uncultivated organism sequence
  Category: MG90 effectors
  Description: MG90-103 effector
MIDWGLQQHVTSKLTVPKPKDIKAKLDEYIVKQDYAKKVLAVAVHNHYKRIMSPAKDGIELGKSNILLIGPTGTGKTLLAQTLAKILDVPFAMADATSLTEAGYVGDDVENVVLNLVNAADGDIERACRGIIYIDEIDKIAKKGENPSITRDVSGEGVQQSLLKMIEGTVAAVPPKGGRKHPQQEFLRVDTTNILFICGGAFVGLADIIDKRTSLGSMGFNANVVNKDKRDLSALYHALEPEDLLKFGLIPELVGRLPVVATLEPLDEAALTEILTEPKNSLVKQYKKMFKIDGVDLEFDDDALAEIAKLAIKKESGARGLRSILENAMMPFLYAVPGMPNMKKLVVTSDIIAKQGDLSQIDELNARYNAKQDDKSSNASTKTSDAKSDADQSDDAKSGSEQSDDKSISSDDTIDDKSINADDKKAKSARAKKTKKTDP

SEQ ID NO: 2781 - protein, 408 aa, Unknown
  Description of Unknown: uncultivated organism sequence
  Category: MG90 effectors
  Description: MG90-104 effector
MTAGNNNQTVRYNYRLYPTKTQETVLNRLFGCCRVVYNDTIDFFNNNFNPNNQSKLPTASKASKQILTNAKKTTKRAFLKEVSSVALQQEFRNAWLACWHGVSHTSNQKPAKRKTKKHNPVNSANFTSNGFSVNQHGVYISKIGVIKTKWSRPMPSEPTSCTISHARNGRWYASFVVKRPKTPFKQCDNNAGIDMGLTDMATIVNTRGERWKIANPRNYAKIQDKIGRLQRHLSKQTKGSKRYERTRHQIALLYSKAHDALADYQWKNVLNIIRETQAIGVETLDIQSMKAKHGKSVRDAAMRSFLNKLGSKAEEHDRSIIQLNQWLATTKLCALCKYKLKAGIPEYARHWVCPKCGAHLDRDYNAALNILDAAGLAESLNARGGGVRSFLASAENGCSRRTAYHPSF

SEQ ID NO: 2782 - protein, 438 aa, Unknown
  Description of Unknown: uncultivated organism sequence
  Category: MG90 effectors
  Description: MG90-106 effector
MPKDEFTTRRLHRCSFCYKTQDQVRRLVAGPDGYSGDEGIKLCYDIIADDVTPMSTAAPDSPSLPLPSEMKAVLDEYVIGQDEAKRTLCVAVYNHYKRINAPQKAGDVELQKSNILMVGPTGCGKTYLAQSLARILNVPFAIADATALTEAGYVGEDVENILLRLIQAADGDIRAAQRGIIYIDEIDKISRKGENVSITRDVSGEGVQQALLKILEGTVANVPPQGGRKHPQQEFMQIDTTNILFICGGAFDGLAPIIQQRIGSRTLGFGAKLTGDSAADVGNVLRQLRPEDLMKFGLIPEFVGRLPVVVTLDQLDESALVRILTEPRNALVKQYAKLLELDGVSLSFDQDALTAIAHMAMQQKSGARGLRAIIEKALLDTMFDLPGQNDVTACHVTGDVITAGAKPQLTRAAHSARTLRSKKPAALPEEKKEAPDAV

SEQ ID NO: 2783 - protein, 394 aa, Unknown
  Description of Unknown: uncultivated organism sequence
  Category: MG90 effectors
  Description: MG90-107 effector
MEEGSAEKGHVTVVYPAYPNGAQERELLRTLDVVRGLYNHFLAECIADVVEGDRFPTPMEMNKGITEMRSRDEELRSVAVFILRDAPLRVHAAMTRFAKLSAMSGELRLPRFKSESRYRSLAFDPKSVSFDGRRIVLGRWMGLRCGNIDRSHRLHRPEGGRVVTARIVRRGSDRWYVHVTFEVDKRYRSGIDLSDPAQPEAYDLGLCDIITDTKGEKVVAPDLYARHEREIARLQRQIESMEDGPKRRKKQRRLAVLHERIRRRRDGYLDEVANQMVSGHSAVILEDLRLRRMMERDDNPAPRRKLFTEAALGILVRKVEAKAERACIPLVKVDPAYTTRTCSCCGHVGGRMPLTQRVFSCPRCGLEMDRDHNAALNILGSGMGTLRGSAEPSG

SEQ ID NO: 2784 - protein, 392 aa, Unknown
  Description of Unknown: uncultivated organism sequence
  Category: MG90 effectors
  Description: MG90-108 effector
MSRRAGGSEDKWFVTRVYPAYPNRTQERELLRQLDVARGVYNHFADTCIHCLIDGVHIPDPMEMNREFTLMRADDCLLRSVNSYTLREGINRVWQAVERCERRSLADGELHVPRIKTPPRFRSICFDPKSSKIENSRIRLNRDLSVRCRNLVRPRNGRAVTVRAVRRGTGRWYICITYETDRVVRGEMDVGEPDRAEGYDLGLVDLITDSSGNKIRTPDFFREAEAELAHLRRQLSRLEEGTAKWLKTRRRIARIEERIRSRRDGCLDRVADWMVSGKPTVVVEDIDVRRLASREDGTLVRRKRFTEAAWATLVGKAERKARKTDVRLIRVSPAYTTRTCSRCGHVGDGIPLSERMFRCPACGLEMDRDRNAARNILGSGMGTQRCTAEPSG

SEQ ID NO: 2785 - protein, 391 aa, Unknown
  Description of Unknown: uncultivated organism sequence
  Category: MG90 effectors
  Description: MG90-109 effector
MEEGSADKGHVTIVYPAYPNVGQLLRTLGVVRGLYNHFLAESIADVMEGDRFPTPREMNKAITVMRGRDIGLGSVAVFTLRDAPLRVHAAMTSFAKLSARSGELRLPRFKSESRYRSLAFDPKGVKFDGRRIVFGKWMKLRCGNLDRNRKLHRPEGGRIVTARIVRKGSGRWYVHITFEVDRRYRSEIDLSDPAEPEAYDLGLCDIITDSKGERIGAPDLYARHENEIARLQRQIASMEDGPKRRKKPRRLSVLHERIRRRRDGYLDEVADRMVSGHSAVILEDLRLRRMIERDDSPAPRRKLFTEAALGTLVRKVEAKAERACIPLVKVDPAYTTRRCSCCGHVGEKMPLSLRVFSCPRCGLEMDRDHNAALNILGSGMGTLRGSAEPSG

SEQ ID NO: 2786 - protein, 411 aa, Unknown
  Description of Unknown: uncultivated organism sequence
  Category: MG90 effectors
  Description: MG90-110 effector
MFETQVPMRKCSFCGRPQNEVEALITGAGGVAICNFCIDECYKMLHEGEEKKKGAPISIDKLPTPKEIKEFLDQYVIGQEEAKKVLSVAVYNHYKRIMAGGSVDDVELEKSNILLIGPTGSGKTLLARSLAKLLDVPFAIADATTLTEAGYVGEDVENILLRLIQAADYDIEKAQRGIIYIDEIDKIARKSENPSITRDVSGEGVQQALLKILEGTIANVPPQGGRKHPHQQYIQIDTSNILFICGGAFVGLEDIIARRIGKGSMGFTADVDKKKMERDELLKHVEPDDLVKFGLIPELIGRLPVIATLKELKEEDLVRVLTEPKNALVKQYKKLLELEGVELEFTEEALREIAREAIRRKTGARGLRAIMEKLMTNVMFEVPTRKDIKKVIIDAEAVKTGKPKYELTKAS

SEQ ID NO: 2787 - protein, 385 aa, Unknown
  Description of Unknown: uncultivated organism sequence
  Category: MG90 effectors
  Description: MG90-111 effector
MLLSGIEGYICKDCSDQAVKIFKEQHQHRPGKGYDPNTPIPTPTEIKEFLDLYVIGQDAAKRVLSVAVYNHYKRLKYNALNGDKNDVEIEKSNIILVGETGTGKTLLARTIARLLKVPFCIADATTLTEAGYVGDDVENVLVRLLQAADYDVAAAERGIVFIDEIDKIARKSENTSITRDVSGEGVQQALLKLLEGAEVSVPPEGGRKHPEQKLINVNTRNILFICGGAFDGVERSIAARLNSNVIGFKGDEKRQELDRENMLQYVQPMDLKKFGLIPELVGRFPVLTHLEALDRDALRRILTEPKNALTKQYEALFSMDGVELKFDPAVLDMIVDRAVEYHLGARGLRGIMEGIMTDLMFDLPQMPKGGTYTLTPEVAKAKMKL

SEQ ID NO: 2788 - protein, 340 aa, Unknown
  Description of Unknown: uncultivated organism sequence
  Category: MG90 effectors
  Description: MG90-112 effector
MVGQDRAKRSIAVAVYNHYKRILGKGDPNVDIEKSNILMIGPTGSGKTYIARSLAKILGVPFAIADATTLTEAGYVGEDVENVLLKLINAADNDIKRAEKGIVYIDEIDKIARKGENTSITRDVSGEGVQHALLKILEGTVASVPPQGGRKHPQQEMLKIDTSNILFICGGAFAGIEKILAKETKKNAIGFGAAFEEKKEMTLSEQLRGLTPQDLMKFGLTPEFVGRLPVFVALDELDEEAMVRILTEPRNSLVKQYQKLLEIDGVELEFEPEALREIAQTAMRKNTGARGLRAIMENVMEDIMFDMPDEENVKKCIVTKAAVLGEEKPVLVRGKQDRSA

SEQ ID NO: 2789 - protein, 426 aa, Unknown
  Description of Unknown: uncultivated organism sequence
  Category: MG90 effectors
  Description: MG90-113 effector
MNDIVDIDENQHYCCFCGKAISDEATVVQGDDNVLICFDCIKEIYEENIERVEQHKKNALINKLNKDVTPSSIKRYLDEYIIGQESAKKVLSVAVYNHYKSLRIKSKDNAVDLEKSNIILLGPSGCGKTAILKALSKFLNVPFAMADASTLTAAGYVGADVETVLQKLILEANGDIKKAQKGIVYIDEIDKIARKGENLSTTADPGHEGVQQALLKMIEGSVVSVPPKGQRNHPQADMIRIDTSNILFIVGGAFENIDKIVEKRIKSSKGSMGFNGVLKDTSKTYNDFIKEVRTEDLKKFGMLPELLGRLPIICPMEELDKKALIRILTEPKNALVKQYQAILQADNVKLSFTEKALEYIADKAIKRKTGARSLRSILEEELNQTMYELPDKKDITAVLVAVENNNICIEYIKEIEGVKIYDNICK

SEQ ID NO: 2790 - protein, 391 aa, Unknown
  Description of Unknown: uncultivated organism sequence
  Category: MG90 effectors
  Description: MG90-114 effector
MIYGPGIAKAQKKAAKKDGDKSLSSMKLLKPREIKEFLDDYVIGQDDAKISLAVAVYNHYKRIMSQEAAEKNLNDDDGVDLQKSNVLLLGPTGVGKTFLAQTLAKLLNVPFAIADATTITEAGYVGDDVENVLLRLIQAADFDIKAAERGIIYIDEIDKIARKSENTSLTRDVSGEGVQQALLKIIEGTVSNVPPQGGRKHPNQEVIQINTKNILFICGGAFDGLERQIQKRIGKAPIGFGGDIKAHHEIKDNIFKKVIPKDLVKFGMVPEFVGRLPVITVLDELDEDSLVKILTEPKNALIKQYKKLFDYDDIELEIEDGALVEIAKKAIAQKTGARGLRSILEGILMNTMFTVPSDGSIAKVTVTADCVLNGTQPILMNRRNKVVTIAV

SEQ ID NO: 2791 - protein, 435 aa, Unknown
  Description of Unknown: uncultivated organism sequence
  Category: MG90 effectors
  Description: MG90-115 effector
MAKYDDPKDRTIRCSFCGRTQDQVGMLIQGPDAFICDSCIASCLEIIESGESDSIGKPAGKKKPTASPRILPKPNELKARLDEYVIGQDEAKIALSVAVYNHYKRIYRKPKTDVEITKSNVLLLGPTGVGKTFLAQNLAKTLDVPFAIADATTLTEAGYVGEDVENILLRLIQAADFDVEKAERGIIYIDEIDKIARKSENTSITRDVSGEGVQQALLKILEGTVANVPPQGGRKHPQQEFIQIDTSNILFICGGAFDGIERIGEKRLGNSVLGFGSELIVKSELDHDTIMQKVIPQDLIKFGLIPELVGRMPVLTALRNLDEDALVRILKEPKNALFKQYKALFEIDKVELEFTDDAFRAIARSALEKNTGARGLRAIMEKVLQPVMYEIPSDPSVTRVTVTAACVNGEGNPAIERDPTRLAPPKENNLKPTIA

SEQ ID NO: 2792 - protein, 427 aa, Unknown
  Description of Unknown: uncultivated organism sequence
  Category: MG90 effectors
  Description: MG90-116 effector
MDNHKKNVICSFCGKKVSEDNFVAQGIEENIFICQDCINEIHKTVADADSFIETIEESRKKEEKKMSKLPRPSEIKAHLDQYIIGQDYAKRVLSVAVYNHYKMLDVKLNKKAINKDVELEKSNVLLAGPSGSGKTAILKALAKLLKVPFVIADATEYSEAGYVGKDVECIARDLISAANGDIRKAERGIVYIDEIDKTGRKGENLSATADPGHEGTQQALLKLLEGSVIDVPMDGRRLNPESRNLQKIDTTNMLFIVGGAFEGIDKIIAKRKRQGKNTIGIGANLTDRKNDQFNDFIEDLTTEDLKKFGMLPEILGRVPVIAPLKELTEDQLVHILYQPKNALVKQYQELLAQDGVELEVTDAALTAIAKKAIKRKTGARGLRGIMEDILNPVMFSIPDKDEDYVLIDAVDGKLEISYQKKIKREAV

SEQ ID NO: 2793 - protein, 346 aa, Unknown
  Description of Unknown: uncultivated organism sequence
  Category: MG90 effectors
  Description: MG90-117 effector
MIGQDEAKRVLAVSVYNHYKRILSGKGSDVELQKSNVLLLGPSGVGKTLLAQTLAKMLGVPFAIADATTLTEAGYVGEDVENILLKLIQAADFDVQKAQIGIIYIDEIDKITRKSENPSITRDVGGEGVQQALLKILEGTVSNVPPQGGRKHPQQEFIQIDTTNILFICGGAFDGLDKYILRRTDKSALGFGSSLKDNSSEAEKALLRKVEPHDLVKFGLIPELIGRLPVITVLDDLDEDALVRVLKEPRNSLVKQYKELLSMDNVELNFTDEALHAIARKTIERKTGARGLRSVMESILLPIMYEVPTDATIIRVTVDEDTVEGGEAHLEYGAVRKRYKNQAALS

SEQ ID NO: 2794 - protein, 403 aa, Unknown
  Description of Unknown: uncultivated organism sequence
  Category: MG90 effectors
  Description: MG90-118 effector
MRKCSFCGRPQNEVEALITGAGGVAICNFCIDECYKMLHEEEQKKGAPVSIDKLPTPKEIKEFLDQYVIGQEEAKKVLSVAVYNHYKRIMAGGSVDDVELEKSNILLIGPTGSGKTLLARSLAKLLDVPFAIADATTLTEAGYVGEDVENILLRLIQAADYDIEKAQRGIIYIDEIDKIARKSENPSITRDVSGEGVQQALLKILEGTIANVPPQGGRKHPHQQYIQIDTSNILFICGGAFVGLEDIIARRIGKGSMGFTADVDKKKMERDELLKHVEPDDLVKFGLIPELIGRLPVIATLKELKEEDLVRVLTEPKNALVKQYKKLLELEGVELEFTEEALREIAREAIRRKTGARGLRAIMEKLMTNVMFEVPTRKDIKKVIIDAEAVKSGKPKYELTKAS

SEQ ID NO: 2795 - protein, 393 aa, Unknown
  Description of Unknown: uncultivated organism sequence
  Category: MG90 effectors
  Description: MG90-119 effector
MEQEDKASGKKSKGKQKEDKHELIKPAELKEILDKYIIGQDEAKKTICVSVYNHYKKNFFGDEATADEIELQKSNVLLLGPTGVGKTMIAQTLANVLKVPFAIADATTLTQAGYVGEDVENVLLRLIQAADYDIEAAEHGIIYIDEIDKITRKSENTSITRDVSGEGVQQALLKIIEGTVSNVPPQGGRKHPNQEFIQINTKNILFICGGAFEGIDKLVMQRTSSSALGFGAEVKSKQDNKINEARHQGEPEDLDKFGIIPELVGRLPVIAVLDDLDEDALVKILSEPKNAILKQYSYMFSLDGIELEITDDAMRAIAKKAAERKTGARGLRTVVEEALSDIMFDAPSDDTISKVILTGECVTDGKAPEVIRDPSARKNRRNSEKKTAKKNPA

SEQ ID NO: 2796 - protein, 354 aa, Unknown
  Description of Unknown: uncultivated organism sequence
  Category: MG90 effectors
  Description: MG90-120 effector
MDQYVIGQDAAKKVLSVAVYNHYKRVLAGKDLDVELQKSNILLLGPTGSGKTYLAQTLAKILNVPFAIADATTLTEAGYVGEDVENILLKLIQAADYDIERAQHGIIYIDEIDKITKKSENVSITRDVSGEGVQQALLKILEGTEASVPPQGGRKHPQQELIPIDTTNILFICGGAFDGLGKIIERRLDKGSIGFNSQIIEKTDKSEDELFKQVMPEDLTKFGLIPEFIGRVPVTVSLDFLDEKALERILTEPKNALIKQYKKLFELDGVELKFTDEAINTIAKKAVERKTGARGLRAILENAVMDIMYETPSDETIKECIVNEDVINGLADPELVYNSVIGKKKAKKNKDKTA

SEQ ID NO: 2797 - protein, 367 aa, Unknown
  Description of Unknown: uncultivated organism sequence
  Category: MG90 effectors
  Description: MG90-121 effector
MKIRFEEFKDEISTDILDSKTPKELLAILNDYVIGQDNAKRALSVAVYNHYKRINFMASKADEEVELQKSNILMIGPTGSGKTFLAQTLAKSLNVPFAIADATSLTEAGYVGEDVENILLKLLQAADYNVDRAERGIIYVDEIDKIAKKSENVSITRDVSGEGVQQALLKIIEGTVASVPPQGGRKHPNQEMIQLDTKNILFIVGGAFDGIEEIVKQRLGEKIIGFGFNNKALSEDMSYMQEIIAEDIQKFGLIPEFIGRLPIVAALESLTESDLVHILTQPKNALVKQYQRLLSFDNVELEFEDAALKAIAEKAIQRKTGARGLRSIIEEVMMDVMFEIPSMTGIRKVVITEDAVLGTNEPLLIGA

SEQ ID NO: 2798 - protein, 393 aa, Unknown
  Description of Unknown: uncultivated organism sequence
  Category: MG90 effectors
  Description: MG90-122 effector
MEQEDKASGKKSKGKQKEDKHELIKPAELKEILDKYIIGQDEAKKTICVSVYNHYKKNFFGDEATADEIELQKSNVLLLGPTGVGKTMIAQTLANVLKVPFAIADATTLTQAGYVGEDVENVLLRLIQAADYDIEAAEHGIIYIDEIDKITRKSENTSITRDVSGEGVQQALLKIIEGTVSNVPPQGGRKHPNQEFIQINTKNILFICGGAFEGIDKLIMQRTSSSALGFGAEVKSKQDNKINEALHQVEPEDLVKFGIIPELVGRLPVIAVLDDLDEDALVKILSEPKNAILKQYSYMFSLDGIELEITDDAMRAIAKKAAERKTGARGLRTVVEEALSDIMFDAPSDDTISKVILTGECVTDGKAPEVIRDPSARKNRRNSEKKTAKKNPA

SEQ ID NO: 2799 - protein, 496 aa, Unknown
  Description of Unknown: uncultivated organism sequence
  Category: MG90 effectors
  Description: MG90-123 effector
MQTKNPDSQTMDPKKARCVFCGKTADEVAGMIQSPDGTCICDECILYCTDVLARGGYLNGRHPSQGNMPDSFDGDFDGYEGHIAQAPFDDEEQGAPSAAEILAALPTPHELFDRLSQHVVGQEAAKRALSVAVYNHYKRISLGAESNDDDVELAKSNIMLLGPTGSGKTLLAQTLARTLQVPFAIADATTLTEAGYVGEDVENILLKLITAADFDIERAQIGIIYIDEIDKIARKAENLSITRDVSGEGVQQALLKIVEGTEASVPPQGGRKHPQQELIHIDTTNILFILGGAFVGLADIIGQRVGKKGIGFTSDVPQSKKHAEAELLEKVLPEDLNKFGMIPEFVGRIPVICSLDELTEDDLVHILTDPKNALVKQYVRMFEFENSELVFTPEALRAIAHEAVEHGTGARGLRAICERVLQDVMFDLPEHAGRGWLFARAISRAKRNPKSSRRPTRLSSPNKCHGLAACATGLFQYSALQANKLGAESGRAFQEL

SEQ ID NO: 2800 - protein, 338 aa, Unknown
  Description of Unknown: uncultivated organism sequence
  Category: MG90 effectors
  Description: MG90-125 effector
MIGQDDAKRYMSVAVYNHYKRLLHASGEASEVELDKSNILLVGPTGTGKTLMARTIAKLLNVPFTIVDATVLTEAGYVGEDVESILSRLLQVASYDVELAQRGIVFIDEIDKIARKSDNPSLTRDVSGEGVQQALLKILEGTVVNVPPQGGRKHPEQQFVQVDTRNILFICGGAFDGIEKKIAQRLNTRAMGYGRMNADSVDRNNLMQYLMPQDLRSFGLIPELVGRLPVLTYMEPLGREALRSILTQPKNAIIKQYEKLFEMDGVKLVFDDEVLDYIVDKAIEYRLGARGLRSICEAIMMDTMFDIPSSGERRFEVTLPYAREKFEKKKFLALKQVG

SEQ ID NO: 2801 - protein, 337 aa, Unknown
  Description of Unknown: uncultivated organism sequence
  Category: MG90 effectors
  Description: MG90-127 effector
MLAVSVYNHYKRILSGKGADVELQKSNVLLLGPSGVGKTLLAQTLAKMLGVPFAIADATTLTEAGYVGEDVENILLKLLQAADFDVQKAQVGIIYIDEIDKITRKSENPSITRDVGGEGVQQALLKILEGTVSNVPPNGGRKHPQQEFIRIDTTNILFICGGAFDGLDKYILRRTDRSALGFGSSLKDNSEDAQRALLRKVEPHDLVKFGLIPELIGRLPVITVLDDLDEDALVRVLKEPRNSLVKQYKELLSMDSVELEFTDEALHAIARKTIERKTGARGLRSVMEGILLPVMYDVPNDPTIIRVTIDKDTVEGGEAHLEYGAVRKRYKNQTALS

SEQ ID NO: 2802 - protein, 398 aa, Unknown
  Description of Unknown: uncultivated organism sequence
  Category: MG90 effectors
  Description: MG90-128 effector
MDIIADEDSLHRGRPQPKNKPRAEMVLPKPQEIKKQLDEYVIGQDEAKMTLAVAVYNHYKRIFFSGEDGGVEIAKSNVLLLGPTGVGKTYLAQTLAKLLDVPFAIADATTLTEAGYVGEDVENILLRLIQAADYDIERAEHGIIYVDEIDKISRKSENPSITRDVSGEGVQQALLKILEGTIAGVPPKGGRKHPQQEVINIDTSNILFICGGAFDGLKSVIQRRTETQTLGFNSVIKSKDELDNTEWMKEVTPHDLVKFGLIPELVGRLPVITALSDLDKAALVRILTEPKNCLVSQYKKLFDLDKVDLEFTPEALDAIAEKTIARKTGARGLRSIMEDTLKNLMFEVPSDYTIEKITVTKDSVENGAAPEIVHNPDRVPVKIKMTQPKRLARKDSAS

SEQ ID NO: 2803 - protein, 537 aa, Unknown
  Description of Unknown: uncultivated organism sequence
  Category: MG90 effectors
  Description: MG90-129 effector
MPNLLNYKYEIFPTKPQKAQLYRILRESKYQWNKAVTIRKKLKSALVSGQIEFVINTCLSAEKNNQQGQRANAIEKLRSQFPEMEFETAAHCYDVKNIIGKVLGDLPIEKLLDLKSLSEELKTRHEKEVANRKDAIAKGIDNKKLPKLTVLWQLIGAINRYAGYAAKKYMDKSFESSKGMSVSPVRSNISGSANSPRWNNAVQPSKDQRSYGATGEPNYKKRCDGFSYQIPQKKAEAVSEFFRLKRQNHGYQIFLNPLHEGNRWIDTAYHRPIPEGSKIKQMTINERAGHFFAVLSVEVPDRAWMIASMQAGWWAGIDPGASTALTIAFHNAETSETRQAAINYQFLEKSLAQLEKLQQCIAKKQGPRRKRTEDEVNKELAQFSKKQSIQKLPEQERSKIIAKKKENLEKKMIRQDASNSWKKFSRKVGEFNYRIANKRLDVLHKISRSLIEGCDVVGIGHWEPERQVSYRKERKALKKQVKAGVAGAKERLNALEEEKSKQGPKGVKKARRGGRDRAIATLRGLVDEKAKRAGTVE

SEQ ID NO: 2804 - protein, 423 aa, Unknown
  Description of Unknown: uncultivated organism sequence
  Category: MG90 effectors
  Description: MG90-130 effector
MAEEIKESVCSFCGKHYTDNDKTILFTADTPGALICYDCAKEIYSNYKDKIDSMREVSGSVQADQKWTPQSMKEYLDQYIIGQEKAKEILCTAVYNHYQILKMREDGNKNAVEVEKSNVIMAGPTGVGKTAIIKRLAKIMQVPCVIADSTSLTSAGYVGDDVESVIQSLLIEADYDVEKAQKGIVYLDEIDKTNRHGENPSTTADPGHEGTQQALLKLIEGTVANVPLKGQRKHPNADMVKVDTSNILFIVGGAFEGIEKIITRRHNSGMAGVGFGSVLVNDKDKKKSYNEIISDLRVEDLKKFGMTPELLGRLPVICPMKELTEEQLVEILSKPKNSLLKQYQTLFKAQGVDLTFDDEALKTVAHLAIERKTGARGLRGIMESILSHEMYSIPSDDSIGSVTVTGKDFEIIRGEKPAEEISA

SEQ ID NO: 2805 - protein, 365 aa, Unknown
  Description of Unknown: uncultivated organism sequence
  Category: MG90 effectors
  Description: MG90-131 effector
MYKRQIKTPAEIKEGLDQYVIGQDEAKRVLAVSVYNHYKRILSGKGADVELQKSNVLLLGPSGVGKTLLAQTLAKMLGVPFAIADATTLTEAGYVGEDVENILLKLIQAADFDVQKAQIGIIYIDEIDKITRKSENPSITRDVGGEGVQQALLKILEGTVSNVPPQGGRKHPQQEFIQIDTTNILFICGGAFDGLDKYILRRTDKSALGFGSALKDNSSEAEKALLRKVEPHDLVKFGLIPELIGRLPVITVLDDLDEDALVRVLKEPRNSLVKQYKELLSMDNVELDITDEALHAIARKTIERKTGARGLRSVMENILMPIMYDVPNDPTIIRVTIDEDTVEGGEAHMEYGAVRKRYKSQTSLS

SEQ ID NO: 2806 - protein, 508 aa, Unknown
  Description of Unknown: uncultivated organism sequence
  Category: MG90 effectors
  Description: MG90-132 effector
MGGGRRHTGNRNQGDPNLYAQRYGAKAPLEWTEAHARVLLLADQLWDDLRAIWIQCLHEQEMVEDATGDAELLSARGAVSRTEAQVDAAFQARRDWRQRHRSKQAPEEIEASIKAAISAAREARRELWPVLKRVRKEIREELLDLWNARDQQMRVLAQGRTRKYTDLHDGVYNDIFKRFRVAAKEGAKQGIVPRPSHEHLSQSIYRQIQPHNFGGKLVSDPKKPGKRRKRIGGSQKGAEWSTLCTTGCGKVRVLPYSPGPRVTQRWGLLVMPVDANGLEIKIPIRVDDREPPQGAQIKGVRVVRRDRKWHTVFSVDAPPPSIERGAGTLYAGLNWRLMADGSLRVLDGIDETGKRYQVCLPRWQLAAVEYAEALQAATDRRAVQAALQLEEDHPKRAKEIAEAVRRRNWAALYPLDPAWADGTHGKQGRRQHTALLRARKIAGGDLAKLTELVAEILGDRAGRRRIAGQKSKNTRRREKFSRECAQAIATRITRLQNAKGDPRTGTTR

SEQ ID NO: 2807 - protein, 354 aa, Unknown
  Description of Unknown: uncultivated organism sequence
  Category: MG90 effectors
  Description: MG90-133 effector
MQLATPSQIKAHLDQYVIGQDEAKRTLAVAVYNHYKRLKQNKKSDVEIQKSNILMIGSTGSGKTYLAQSLAKMLGVPFAIADATTLTEAGYVGNDCETMLRTLLQNANYDIESAQRGIIYIDEIDKISRKGENVSITRDVSGEGVQQALLKIIEGTISEVPVTGSRKHPQAETVKIDTSNILFICGGAFDGIDKIIGKEETHNSIGFGANVADKKESVTDLSKVEQHDLVKYGLMPELIGRLPIITALNPLSEEDLVHILTEPKNAITKQYQELLSMDGVKLEFEDAALRKIAELAIKKKTGARGLRSIIESAMQKVMFDVPDMAGAKKVVVTSAFVEGKADAFVYGARNKKIA

SEQ ID NO: 2808 - protein, 383 aa, Unknown
  Description of Unknown: uncultivated organism sequence
  Category: MG90 effectors
  Description: MG90-134 effector
MSFDELPRPSDIRKNLDDYIIGQERAKIVLSVAGYNHYKRILHGQDDGVELQKSNILLIGPTGSGKTLFAQTMAKMLDVPFAIADATTLTEAGYVGEDVENILLKLLQAADFDVERAQRGIIYIDEIDKIARKSENTSITRDVSGEGVQQALLKIVEGTVANVPPQGGRKHPHQEFIQVNTKNILFICGGAFDGLEKIIERRVEEKSIGFDAPVYSRKEQDVGKLLLQVQPHDLLKFGIIPELVGRLPVIASLNALTRDDLVQILTEPKNALVKQYQKLMEYDDVELEFEPEALTAIADKAIARNIGARGLRAIMEGMLTQIMYDIPSDPTIVKAVITKDCVEGTGKPVLTRDPDKISYSVKLNTGKSGDAKASTDADPASAS

SEQ ID NO: 2809 - protein, 394 aa, Unknown
  Description of Unknown: uncultivated organism sequence
  Category: MG90 effectors
  Description: MG90-135 effector
MLIEQEGKADSKKSKGKHEDEHELIKPADLKAVLDKYIVGQDEAKKTICVSVYNHYKKNFCGDDAKADEIELQKSNVLLLGPTGVGKTMIAQTLANILKVPFAIADATTLTQAGYVGEDVENVLLRLIQAADYDIEAAEHGIIYIDEIDKITRKSENTSITRDVSGEGVQQALLKIIEGTVSNVPPQGGRKHPNQEFIQINTKNILFICGGAFEGIDKLIMQRTSSSALGFGADVKSKQENKINEALHQVEPEDLVKFGIIPELVGRLPVIAVLDDLDEDALVKILSEPKNAILKQYKYMFSLDNIELEITDDAMRAIAKKAAERKTGARGLRTVVEEALSDTMFNAPSDESITKVVLTGECVTEGKKPEIIRDTNAAKLKKSADKKALKKNAG

SEQ ID NO: 2810 - protein, 728 aa, Unknown
  Description of Unknown: uncultivated organism sequence
  Category: MG91 effectors
  Description: MG91-1 effector
MAEEKQMRSYNIQINPDADAIKVIERDMKLMEQLYGFIIYRIESHIQQLREETEYGEYDSNYKEYCLLLAEAEQKKRQCEVFRDAKKRKNIEDPELESQYNELSAEIDKLKKHKNEWCSKCCEFFRSNRKALCHFVFESRRKVIRLKSDMVTPTENSGFILHYGVNGEPYYIYDKTYYMMVEDSIRKANKGDGYSALVCECGVVTKRVSLNEDKTFKDKVYDGVAVLTDDGEIIMPYEYLRIDNLNKNNAHGFSRLFVNEYVYSLNKNPQTKKSQKTSMTYKDYGLTSHDFDENIGNRLTLSYADFPELLSQKHRKNDFMTIMSGQQSKLMDIMCDESGGYFVRMVTHSYGRGKKKYVDIPVLISHRNKNRIGTERDMDTKVLERKLQLLETGKTNVIGISKDVIRGKSRFCVNIFLEYAGGLGLEYNENSLNQKLGLGPVGVDPGMHQIAVYSDSLKKSTIFSLETICGGIFKQKIYECYSKIDSLQKKMSRCMDENNCKAKDEKGNFIKGKKLFKSKRYMAMQKEVSELYRRIAELKETANIFIAHKLLSYGNVFYIEDPRSAEKKRRMQGVVYDANGRVVKNRKFGRSIQKFSISGMIYKILDVIESRGGKIYWINNESAATAYVPKRDNVSHGMGERVFNWLGHKVQRDMKSGYVLSACKELEEMKGKKKYLNKPIYKVVSYDDERLLNDVDVFAESVREEMERCRDLNVEDKTIGIEKYFNKN

SEQ ID NO: 2811 - protein, 510 aa, Unknown
  Description of Unknown: uncultivated organism sequence
  Category: MG91 effectors
  Description: MG91-2 effector
MFVVELPLKVEKWQSDVLNKRYELLAKIYNYAQTKLLRQYIYLTQMDEYKKCKTKQDKSVFFKNHPFYFKGITSKITFSEYDVTNFVNKIIKKNVSSDKTYKDFGINTSITEYLGKHAWSAWKKKIYGNGKKVSFKNKDELNTISIRKKSEYFGGLDVDIEHMILSFNINGRTKTKAKKIILPINVKNLTEYEMYALKDGYDSINVVTIMRKMIRGNYKYYVQFTIEGEKPQKGRTLGKGNVGIDIGPSTVAISSLNGVTIDTLAEKCDNIEDKISDIERKMDRSRRATNPQNFTEDGQIKRIDRKKGEKREWKYSKRYVKLHNKKRELLRKQAAIRKLRHNIKANEILSLGDTFIVENNPTSAWAKRAKGVRKNKNGKIQTNKRFGKSIGNHAPAMFVTILQNKVESLKGKFVKVDPKNAASRFDFTNSDFTEHNLDERKITLSNGNTHQRDMLAAFNLQHIDLTNDDLKKYNVNEMIEDYPIFCKLEKEEIKRFINGIKISNKSNIGI

SEQ ID NO: 2812 - protein, 542 aa, Unknown
  Description of Unknown: uncultivated organism sequence
  Category: MG91 effectors
  Description: MG91-3 effector
MKKEKNNKGNYVITFPLITEPWQEDLLNKFFKHCCDIQNKLIKITLPVFNKHKDEIFKNEERILELCAKKKKSNLNEEETNELSALYEEKKNTLSVIKTDEIKGLVSYPKTIELFSEFGLGATCTKLIKDNIGGTDKKHENLKYNSTFPQIASPIAENIGKRVYCAYEKYIWGNGKIVHYKKNCNFNTVSFCVKKGCTFATVDVIKHNLLFKSSIGIHNGKTMTIPFKVKFDKCDEQQTLSEGQKYEMNALNNQEIKIIGIKRTFVRGKFKFELQLTFEGKPYSKNRTLGNGDVGVDPGVSSLTLYGKTVRQFRAPDNVKKTEQKINELQRYIKHTDKLLNPNKFNENGTLKKGDKAKWKHSNNNLKARKRKKELERQLKEKTKLSQIEFANSVLSEGNVLKIEDNDISNWNKNLKGIRKDKNGKILSNKKYGKSIKRTAPAQGLTILKRKYKSLGGTVIDINEKARATGTDHTNGIYTYRPVSQRKVTLSNGNTHHRDAHAAFNLKHYNNNTKHYDFKKMSEDYQHFCQEESNAFKRNELK

SEQ ID NO: 2813 - protein, 532 aa, Unknown
  Description of Unknown: uncultivated organism sequence
  Category: MG91 effectors
  Description: MG91-4 effector
MPVTSQSFVIELPIAVDDAEMRTIVRKLEFARQLHNATLGTAMGQLQQMRQDAAWKEACVMPKGKERAAAFRALDRKYGLTEYDLHSVIARHREGSGRKAELGINETQKIATRVFQAINRYKLGLGGMPRFKSSKRGLHSIEGKTNKTGLKFRPEKKVLNWCGHDYRVLIDPKDDYIQRALKENERSDKYRKIKYCRLVRKRIRSSDRFFLQVVLEGTAPVKHVYAPVTERAAIDPGPQSIALFSKAFAGKIQVAGSNNFNEAASRRLLRAMDRSLRRNNPDAYNENGTIKKGAKLVKSKNYQRKVDRLREMHRVAAAERKCRHGQTINLLLSIAGDIRIEKNIWKAFQRGHFGKSLGKSAMSGFIAQLKSKAASAGLKVTEVNPYKLKLSQYDPYTDTYRKKDLSERWQEMKAGSGQYIQRDVLSALLLYCADIEKEIHIPKVAVEQLEGAKQFLTDAGYVVLKSTSSRDQRDPRLASEPKAMTPEMARQKILRGAGDSHLPTDQELGQIRAGGKVSTWSKETFPLQRGVV

SEQ ID NO: 2814 - protein, 484 aa, Unknown
  Description of Unknown: uncultivated organism sequence
  Category: MG91 effectors
  Description: MG91-5 effector
MAHKENQKAFVVTFPLRTEKWQEDRIDKMMRMLTTFYNDRQRKLVRRYIYLSHSKAYKESKGKGVVAFKNYMKEHGFSQYGLDAFFKADTKGALYQCGLNSMFLQYLSQCAWSAWDKKLFGKGDFVKTDKVVNIFCSRNKKERFCGFDYDLRTFTISIKSTCTKKIICSIPFVVNKNSEYELYALSQKICRIGIVRKLIRSKYKYYVQFTFDGVPYNKGRNIGTGIVGIDPGPSKIAIVGDNKVEIAKLAPNIEEDERKTARLKRKLDRSRRATNPHMYKEDGTIIKGQRQTCFSKAYNETRKQLADAQRKLTAKRKIAHNELANTLLEYGDTFKVEANSYKSMQARAKATSMTKSGRIRSKKRYGKSIKNRAPSEFLVILKNKLLHYPNGKYYAVPASYACTQFDFTNESFTEHKISERKIVTSDGIQHNRDTLAAFNIKNAIVNDTSTKKKKVTKSKEFFDIVKMKASYNEYCVMERYLLSV

SEQ ID NO: 2815 - protein, 490 aa, Unknown
  Description of Unknown: uncultivated organism sequence
  Category: MG91 effectors
  Description: MG91-6 effector
MAHKENQKAFVVTFPLRTEKWQEDRIDKIMRMLTTFYNDRQRKLVRRYIYLSHSKAYKEAKSKGVVAFKNYMKENGFSLYGLDAFFKADTKGALYQCGLNSMFLQYLSQCAWSAWDKKLFGNGDFVKTTKVVNIFCSRNLKGKFCGFDYDLSTFTIRIKSTCTKKIICTIPFVVNEKSYYELFALSQKICRIGIVRKLIRSKYKYYVQFTFDGIPYNKGRNIGTGIVGIDPGPSKIAIVGDNKVEILKLAPNIEEDERKTARLKRKLDRSRRATNPHMYKEDGTIIKGQRQTCFSKAYNETRKQLADAQRKLAAKRKIAHNELANTLLEYGDTFKVEANSYKSMQARAKATSVTKSGRIRSKKRYGKSIKNRAPSEFLVILKNKLLYYPKGKYYDVPASYACTQFDFTNESFTEHKISERKIVTSDGIQHNRDTLAAFNIKNSIVNDTSTKKKKITKSKEFFDIKKMKASYNEFCIMEHTSFQYKEIMEL

SEQ ID NO: 2816 - protein, 524 aa, Unknown
  Description of Unknown: uncultivated organism sequence
  Category: MG91 effectors
  Description: MG91-7 effector
MNEVFVLELPLQVEKYQADILNKRYEQLRQLYNYVQGKLLRQYRYFEQMKEYQACKTIKEKNDFFKSHPFQVNESLGGDKSAFEISFNEFSIKGFIEKLVQKSAGANMTYADLGFTTNILDHLGASVWAAWDKKLYDFKAKRISFKKYGELDSFSCRRKVVGGKVYFSGMELHLDTMELAIKMNGKQGKNAKFITLKMLYNPKHADYEMWALKGGVDSVKVVKVVRRLVRSQYKYYVQLTIEGEKPQKGRMLGKGNVGIDLGPTTVAVSGENVVSIDKLASKCDNIQEEITRLSRKIDRSRRANNSQNFNEDGTIKRGIKLVWNDSKRYKELRRELAELRRKQAAIRKQQHIDRANALLKEGDTFIVENNQISGWTTRAKETKVNEKTGKIQKKKRFGKSVANHAPSMFVSILENKVKSLGGEVVKVDTKNAASQYDFTDGSFTKHELKERNVTLSNGDTHQRDMLAAFNLQHLKYDEAEAKQYDTGAMAADYERFCQLEQEEIQRYKNKEKKDNRGTIGAEKL

SEQ ID NO: 2817 - protein, 483 aa, Unknown
  Description of Unknown: uncultivated organism sequence
  Category: MG91 effectors
  Description: MG91-8 effector
MAHKENQKAFVVTFPLRTEKWQEDRIDKMMRMLTTFYNDRQRKLVRRYIYLSHSKAYKEAKGKGVVAFKNYMKEHGFSQYGLDAFFKADTKGALYQCGLNSMFLQYLSQCAWSAWDKKLFGKGDFVKTDKVVNIFCSRNMKGRFCGFDYDLSTFTISIKSTCTKKIICTIPFVVNKKSDYELFALSQKTCRIGIVRKLIRSKSKYYVQFTFDGVPYNKGRNIGTGIVGIDPGPSKIAIVGDKKVELRKLAPNIIEDERKTARLKRKLDRSRRATNPHMYKEDGTNIKGQRQICFSKAYNETRKQLAEAQRKLAAKRKIAHNKLANTLLEYGDTFKVEANSYKSMQARAKTTSMTKSGRIRSKKRYGKSIKNRAPSEFLVILKNKLLRYPKGKYYDVPASYACTQFDFTNESFTQHKISERKIVTSDGIQHNRDTLAAFNIKNAIVNDTSKKKKITKSKEFFDIVRMKASYNEFCLMERYLLSV

SEQ ID NO: 2818 - protein, 521 aa, Unknown
  Description of Unknown: uncultivated organism sequence
  Category: MG91 effectors
  Description: MG91-9 effector
MAKEVFVIEFPLKVEKWQSDILNKRYEHLRQLYNYVQGKLLRQYIYFTQMGEYKACKSLKEKKDFFKEHIFHFKGIVGRNKKPLDISFTQYGISGLVSKLGQFSIGGKTYNDIGIGSTILANLAANVWASWDKRLYDIECERISFKKYGELNTFGSGKINKKYFCGFDLHLDRMKLDIKINGRTGKQAKFISLPIRYNLKHVDYEMNALAGGFDSIKVLTVVRRMVRGQYKYYLQMTIEGVKPQKGRHLGKGRVGIDIGPTTIAVSSNSTVSIDKLAAKCDNIEKDIQRINRKLDRSRRTMNPDNFNENGTIKRGVHLIWNNSENYKALRRQKAELQRKQAAVRKMQHIERANSLISEGDTFIIESNPIKGWTARAKETKISEKTGRIQKKKRWGKSVANHAPSMFITILENKVKSLGGTVIKADVKNAASQYDFTDGTFTKHELDERGVTLSNGDTHQRDMLSAFNLQHLIYDAKELKQYDQQRMKSHYPRFCELEQDEIERYRNKVKKDDRCTIAASRL

SEQ ID NO: 2819 - protein, 528 aa, Unknown
  Description of Unknown: uncultivated organism sequence
  Category: MG91 effectors
  Description: MG91-10 effector
MNEVFVLELPLQVEKYQADILNKRYEQLRQLYNYVQGKLLRQYRYFEQMKEYQACKTFKEKRDFFRSHPFHIDGILGSNKELFDITFDEYGINGFVGKLGKKQVSAGVTYADLGITSTLLDRLSLAVWAAWEKMLYDYHARRVSFKKYGELNIFGSRKKTNGSGKKMFSGMELHLEKMEVAIKLNGKVGKAAKFITLPILHNPKHVDYEMWALKGGFDSVTVLTIVRRLVRSQYKYYVQLTIEGEKPQKGRTLGKGNVGIDLGPTTVAVCGENVVSIDKLASKCDNIQEKITRLSRKIDRSRRANNPQNFNEDGTIKRGIKLVWKKDKDLKRYSKLKRELAELRRKQAAIRKQQHINRANALLKEGDTFIVENNQISSWTTRAKETKVNEKTGRIQKKKRFGKSVANHAPSMFINILENKVKSLGGKVVKVDTKNAASQYDFTDGSFTKHELKERNVTLSNGDMHQRDILAAFNLQHLKYDEAEAKQYDTEAMSADYERFCQLEQEEIQRYKNKEKKDDRGTIGAEKL

SEQ ID NO: 2820 - protein, 530 aa, Unknown
  Description of Unknown: uncultivated organism sequence
  Category: MG91 effectors
  Description: MG91-11 effector
MTSQSFVIELPIAVDDAEMRTIVRKLEFARQLHNATLGTAMGQLQQMRQDAAWKEACVMPKGKERAAAFRALDRKYGLTEYDLHSVIARHREGSGRKAELGINETQKIATRVFQAINRYKLGLGGMPRFKSSKRGLHSIEGKTNKTGLKFRPEKKVLNWCGHDYRVLIDPKDDYIQRALKENERSDKYRKIKYCRLVRKRIRSSDRFFLQVVLEGTAPVKHVYAPVTERAAIDPGPQSIALFSKAFAGKIQVAGSNNFNEAASRRLLRAMDRSLRRNNPDAYNENGTIKKGAKLVKSKNYQRKVDRLREMHRVAAAERKCRHGQTINLLLSIAGDIRIEKNSWKAFQRGHFGKSLGKSAMSGFITQLKSKAASAGLKVTEVNPYKLRLSQYDPYTDTYRKKDLSERWQEMKAGSGQYIQRDVLSALLLYCANIEKEIHIPKVAVEQLEGAKQFLTDAGYVVLKSTSSRDQRDPRLASEPKAMTPEMARQKILRGAGDSHLPTDQELGQIRAGGKVSTWSKETFPLQRGVV

SEQ ID NO: 2821 - protein, 530 aa, Unknown
  Description of Unknown: uncultivated organism sequence
  Category: MG91 effectors
  Description: MG91-12 effector
MTFQSFVIELPIAVDDAEMRTIVRKLEFARQLHNATLGTAIGQLQQMRQDTAWKQACAMPKGKERTAAFRALDRKYGLTEYDLHSVIARHREGSGRKAELGINETQKIATRVFQAINRYKLGLGGMPRFKSSKRGLHSIEGKTNKTGLKFRPEKKVLNWCGHDYRVLIDPKDDYIQRALKENERSDKYRKIKYCRLVRKRIRSSDRFFLQVVLEGTAPVKHVYAPVTERAAIDPGPQSIALFSKEFAGKIQVAGSNNFNEAVSRRLLRAMDRSLRRNNPDAYNEDGTIKKGAKLVKSKNYQRKVDRLREMHRVAAAERKCRHGQTINLLLSIAGDIRIEKNSWKAFQRGHFGKSLGKSAMSGFIAQLKSKAASAGLKVTEVNPYKLKLSQYDPYTDTYRKKDLSERWQEMKAGSGLYIQRDILSALLLYCADIEKEIHIPKVAVEQLEGTKQFLTDAGYVVLKSTSSRDQRDPRLASEPKAMTPEMARQKIFRGAGDSHLPTDQELGQIRAGGKVSTWSKETFPLQRGVV

SEQ ID NO: 2822 - protein, 484 aa, Unknown
  Description of Unknown: uncultivated organism sequence
  Category: MG91 effectors
  Description: MG91-13 effector
MAHKENQKAFVVTFPLRTEKWQEDRIDKIMRMLTTFYNDRQRKLVRRYIYLSHSKAYKEAKSKGVVAFKNYMKENGFSLYGLDAFFKADTKGALYQCGLNSMFLQYLSQCAWSAWDKKLFGNGDFVKTTKVVNIFCSRNLKGKFCGFDYDLSTFTIRIKSTCTKKIICTIPFVVNEKSYYELFALSQKICRIGIVRKLIRSKYKYYVQFTFDGIPYNKGRNIGTGIVGIDPGPSKIAIVGDNKVEILKLAPNIEEDERKTARLKRKLDRSRRATNPHMYKEDGTIIKGQRQTCFSKAYNETRKQLADAQRKLAAKRKIAHNELANTLLEYGDTFKVEANSYKSMQARAKATSVTKSGRIRSKKRYGKSIKNRAPSEFLVILKNKLLYYPKGKYYDVPASYACTQFDFTNESFTEHKISERKIVTSDGIQHNRDTLAAFNIKNSIVNDTSTKKKKITKSKEFFDIKKMKASYNEFCIMEHHLLSV

SEQ ID NO: 2823 - protein, 484 aa, Unknown
  Description of Unknown: uncultivated organism sequence
  Category: MG91 effectors
  Description: MG91-14 effector
MAHKENQKAFVVTFPLRTEKWQEDRIGKMMRMLTTFYNDRQRKLVRRYIYLSHSKAYKEAKGKGVVAFKNYMKENGFSQYGLDAFFKADTKGALYQCGLNSMFLQYLSQCAWSAWDKKLFGKGDFVKTDKVVNIFCSRNMKGRFCGFDYDLSTFTIRIKSTCTKKIICTIPFVVNKNSEYELYALSQKICRIGIVRKLIRSKYKYYVQFTFDGVPYNKGRNIGTGIVGIDPGPSKIAIVGDKKVEIAKLAPNIIEDERKTARLKRKLDRSRRATNPHMYKEDGTNIKGQRQICFSKSYNETRKQLADAQRKLAAKRKIAHNELANTLLEYGDTFKVEANSYKSMQARTKATSMTKSGRIRSKKRYGKSIKNRAPSEFLVILKNKLLHYPNGKYYAVPASYACTQFDFTNESFTEHKISERKIVTSDGIQHNRDTLAAFNIKNAIVNDSSAKKKKITKSKEFFDIVRMKASYNEFCLMERYLLSV

SEQ ID NO: 2824 - protein, 511 aa, Unknown
  Description of Unknown: uncultivated organism sequence
  Category: MG91 effectors
  Description: MG91-15 effector
MEKEFFVIELPLKIEKWEADLINKRYELLRSIYNYAQNKLLRQFKYFEQMTEWKNCKTKKNKSDFFKKHPFYFKGISSKITFSEYDITAFVEKLIKKQVSSNKTYKDFGINSSIAESIGKHIWSAWEKKIYNKGEKISFKKKGKLNSISVRKKSGYFGGIDVDLENMLLRLNINGKIGKKSNKITLPIVFDKPTEYEMYSFKNGIDSINVVTIVRKLIRGNYKYYVQFTIEGKKPQKGRVLGKGKVGVDVGPSTVAVSSINGVQIITLAEKCDGIEHKCKLLERKMDRSRRATNPQNYNDNGTIKKIKNEHLKWVYSKRYSKIRNKKCELQRKQAAIRKLQHNINTNELLKFGDSFIVENNPISAWQHKAKETKINKNGKIQSKKRFGKSIANHAPAMFITILENKVKSLGGELIKVDIKNAASRFDFTNSDFVEHKLNERKITLSNGNTHQRDLLAAFNLQHLNSDDESLKSYNIEEMKKDYPIFCKLEETEIDKFVNGQKKSHKYTVGY

SEQ ID NO: 2825 - protein, 530 aa, Unknown
  Description of Unknown: uncultivated organism sequence
  Category: MG91 effectors
  Description: MG91-16 effector
MTSQSFVIELPIAVDDAEMRTIVRKLEFARQLHNATLGTAMGQLQQMRQDAAWKEACVMPKGKERAAAFRALDRKYGLTEYDLHSVIARHREGSGRKAEQGINETQKIATRVFQAINRYKLGLGGMPRFKSSKRGLHSIEGKTNKTGLKFRPEKKVLNWCGHDYRVLIDPKDDYIQRALKENERSDKYRKIKYCRLVRKRIRSSDRFFLQVVLEGTAPVKHVYAPVTERAAIDPGPQSIALFSKAFAGKIQVAGSNNFNEAASRCLLRAMDRSLRRNNPDAYNENGTIKKGAKLVKSKNYQRKVDRLREMHRVAAAERKCRHGQTINLLLSIAGDIRIEKNSWKAFQRGHFGKSLGKSAMSGFIAQLKSKAASAGLKVTEVNPYKLRLSQYDPYTDTYRKKDLSERWQEMKAGSGLYIQRDVLSALLLYCADIEKEIHIPKVAVEQLEGAKQFLTDAGYVVLKSTSSRDQRDPRLASEPKAMTPEMARQKIFRGAGDSHLPTDQELGQIRAGGKVSTWSKETFPLQRGVV

SEQ ID NO: 2826 - protein, 484 aa, Unknown
  Description of Unknown: uncultivated organism sequence
  Category: MG91 effectors
  Description: MG91-17 effector
MAHKENQKAFVVTFPLRTEKWQEDRIDKIMRMLTTFYNDRQRKLVRRYIYLSHSKAYKEAKGKSVVAFKNYMKENGFSQYGLDAFFKADTKGALYQCGLNSMFLQYLSQCAWSAWDKKLFGNGDFVKTTKVVNIFCSRNQKGKFCGFDYDLSTFTIRIKSTCTKKIICTIPFIVNKKSDYELFALSQKICRIGIVRKLIRSKYKYYVQFTFDGIPYNKGRNIGTGIVGIDPGPSKIAIVGDNKVEILKLAPNIEEDERKTARLKRKLDRSRRATNPHMYKEDGTTIKGQRQTCFSKAYNETRKQLADAQRKLAAKRKIAHNELANTLLEYGDTFKVEANSYKSMQARTKATSVTKSGRIRSKKRYGKSIKNRAPSEFLVILKNKLLYYPKGKYYDVPASYACTQFDFTNESFTEHKISERKIVTSDGIQHNRDTLAAFNIKNSIVNDTSTKKKKITKSKEFFDIKKMKASYNEFCIMEHHLLSV

SEQ ID NO: 2827 - protein, 525 aa, Unknown
  Description of Unknown: uncultivated organism sequence
  Category: MG91 effectors
  Description: MG91-18 effector
MNEVFVLELSLQVEKYQADILNKRYEQLRQLYNYVQGKLLRQYRYFEQMKEYQACKTFKEKRDFFRSHPFHIDGILGSNKEPFDITFDEYGINGFVGKLGKKQVSTGVTYADLGITSTLLDRLSLAVWAAWDKMLYDYHAHRVSFKKYGELNIFGSRKKTNGSGKKVFSGMELHLEKMEVAIKLNGKVGKAAKFITLPILHNPKHADYEMWALKGGFDSVTVLTIVRRLVRSQYKYYVQLTIEGEKPQKGRTLGKGNVGIDLGPTTVAVSGENVVSIDKLASKCDNIQEEITRLSRKIDRSRRANNPQNFNEDGTIKRGIKLVWNDSKRYKELRRELAELRRKQAAIRKQQHIDRANALLKEGDRFIVENNQISGWTTRAKETKVNERTGKIQKKKRFGKSVANHAPSMFVSILENKVKSLGGEVVKVDTKNAASQYDFTDGSFTKHELKERNVTLSNGDTHQRDMLAAFNLQHLKYDEAEAKQYDTEAMAADYERFCQLEQEEIQRYKNKEKKDDRGTIGAGDL

SEQ ID NO: 2828 - protein, 494 aa, Unknown
  Description of Unknown: uncultivated organism sequence
  Category: MG91 effectors
  Description: MG91-19 effector
MARENEDSGCFVVTFPLKTEKWQEDRIDKILNLLTVRYREKQKTLLDRYIHLSHSPEFKEAKNAGLKAFRDFMNEHKFTKFDIQKVFSDSSLSKSATTDVMLTHGINSDIMEELSHRAWSAWEKKLYGQGKFIRLDNEVNIFKSRRHKEHITGFEYSFTDMTLSMNATKPKKHTMFTIPFVVNRKREYEAYALGCEVRNIAIVRQQIRGKNKYYVQFSFAGTPYNKGRKIGTGIVGIDPGPSKIAIVSDSEIRITTLAPSVKRDERAVCRMQRKLDRSRRATNPDNYNDDGTIKRGIKLKFEKSNSYKRTQAKLADMQRKLAAKRKIDHNILANEIITMGNEFHVENNSFKSMQARSKETKKNDKGKNLSKKRFGKSLANRAPSELLTILKNKVCQYADGEYVDIPSGVSCTQFDFTNGEFTKHELKERIITTSDGFVHDRDALAAFNMRFVNRQRIEGKKKVEKDKENFDLQAMTKAYKQFCALEENIKNRDK

SEQ ID NO: 2829 - protein, 375 aa, Unknown
  Description of Unknown: uncultivated organism sequence
  Category: MG91 effectors
  Description: MG91-20 effector
MLNWCGHDYRVLIDPKDDYIQRALKENERSDKYRKIKYCRLVRKRIRSSDRFFLQVVLEGTAPVKHVYAPVTERAAIDPGPQSIALFSKEFAGKIQVAGSNNFNEAVSRRLLRAMDRSLRRNNPDAYNEDGTIKKGAKLVKSKNYQRKVDRLREMHRVAAAERKCRHGQTINLLLSIAGDIRIEKNSWKAFQRGHFGKSLGKSAMSGFIAQLKSKAASAGLKVTEVNPYKLRLSQYDPYTDTYRKKDLSERWQEMKAGSGLYIQRDVLSALLLYCADIEKEIHIPKVAVEQLEGAKQFLTDAGYVVLKSTSSRDQRDPRLASEPKAMTPEMARQKIFRGAGDSHLPTDQELGQIRAGGKVSTWSKETFPLQRGVV

SEQ ID NO: 2830 - protein, 528 aa, Unknown
  Description of Unknown: uncultivated organism sequence
  Category: MG91 effectors
  Description: MG91-21 effector
MNEVYVLELPLRVEKYQADILNKRYEQLRQLYNYVQGKLLRQYRYFEQMREFQDCKTFKAKREFIKSHPFHVNGVIGRNKELLDIFFDEYGIQGFVAKLGQKPIGSGMNYTDMGISSTILANLSANIWSAWNKKLYDYRAERIAFKRYGGLNTFGSGKIVQKKDGEVKEYFPGMVLRLESMELDIKTNGKLGKNAKFITLPILHNPKHADYEMWALKGGMRSVKVLTVVRRMVRNQYKYYLQMSIEGEKPQKGRTLGKGNVGIDLGPTTVAVSGENIVSIDKLASKCDNIQKEITRLARKIDRSRRANNPQNFNEDGTVKRGIKLVWNDSNRYKELRREMAELQRRQAAIRKQQHIDRANELLKEGDTFIVENNQISGWTRKAKETKVNEKTGKIQKKKRFGKSVANHAPAMFVTILENKVKSLGGEVVKVDTQNAASQYDFTNDSFEKHELKERSVTLSNGDTHQRDMLAAFNLQHLKYDDKEKKQYDTEAMKEHYERFCEMEQEEITRYKNKEKKDDRTTIGASDL

SEQ ID NO: 2831 - protein, 383 aa, Unknown
  Description of Unknown: uncultivated organism sequence
  Category: MG91 effectors
  Description: MG91-22 effector
MFLQYLSQCAWSAWDKKLFGKGDFVKTDKVVNIFCSRNMKGRFCGFDYDLSTFTIRIKTTCTKKIICTIPFVVNKNSEYELYALSQKICRIGIVRKLIRSKYKYYVQFTFDGVPYNKGRNIGTGIVGIDPGPSKIAIVSDEKVEIAKLAPGIEEDERKTARLRRKLDRSRRATNPHMYKEDGTIIKGQRQTYFSKVYNETRKQLADAQRKLAAKRKIAHNELANTLLEYGDTFKVEANSYKSMQARTKATSMTKSGRIRSKKRYGKSINNRAPSEFLVILKNKLLYYPKGKYYDVPSSYACTQFDFTNESFTEHKISERRIVTSDGIQHNRDTLAAFNIKNAIVNDTSTKKKKITKSKEFFDIVKMKASYNEFCVKERYLLSV

SEQ ID NO: 2832 - protein, 543 aa, Unknown
  Description of Unknown: uncultivated organism sequence
  Category: MG91 effectors
  Description: MG91-23 effector
MEKEMFVIEFPLKVEKWQADILDKRYEHLRKIYNYAQGKLVRQYDYLTQMKEYRRHGFSKEYEGMLVERGYEKALRAIKAAKDQFFRNHPFHVSGVSDSSGKPMNITFSSFGIPGFIEKLASHRIGADTTYGDLGINSIILGLLGKQLWSAWDRMINDPNTEKVSFKKYGELNSFATRVKGKEGKKVSSGMNLYLDTMTLDIKVNGKTGRNAKFISLPIVYNLKHADYEMNALHGGLESIKVIKVLRRLVRGKYKYYLQLTIGDEKPQKGRQLGKGRVNIDLGLTKIAVYSDAGVMVRPLAPSTEKIDHQILLVQRKMDRSRRANNPGYFNADGTIKELEKGERRRWMNSEEYKRLRMQKAELQRRQAAVRKQDHISLANELLKLGNLFVIEDNDVKEWQQRKKEAIRREEDGKNLSQAGFGKHVANHAPAMFVTILENKVKSLGGTLVKVDTNNGATEYDFTNDTFTKHDLTERYITLSDGKRHQRDTLAAFNLGFLNLDPQKKRSYNRENMRGHYDRFCQMEEIALKSYRSQSAVGAVNNL

SEQ ID NO: 2833 - protein, 484 aa, Unknown
  Description of Unknown: uncultivated organism sequence
  Category: MG91 effectors
  Description: MG91-24 effector
MAHKENQKAFVVTFPLRTEKWQEDRIDKMMRMLTTFYNDRQRKLVRRYIYLSHSKAYKEAKGKGVVAFKNYMKENGFSQYGLDAFFKADTKGALYQCGLNSMFLQYLSQCAWSAWDKKLFGKGDFVKTDKVVNIFCSRNKKERFCGFDYDLSTFTISIKSTCTKKIICTIPFVVNKKSDYELFALSQRICRIGIVRKLIRGKYKYYVQFTFDGVPYHKGRNIGTGIVGIDSGPSKIAIVGDNKVEIAKLAPNIEEDERKTARLKRKLDRSRRATNPHMYKEDGTIIKGHCQTCFSKVYNETRKQLADAQRKLAAKRKIAHNELANTLLEYGDTFKVEANSYKSMQARTKATSMTKSGRIRSKKRYGKSIKNRAPSEFLVILKNKLLHYPNGKYYAVPASYACTQFDFTNESFTEHKISERKIVTSDGVQHNRDTLAAFNIKNAIVNETSTKKKKITKSNEFFDIVRMKASYNEFCLMERYLLSI

SEQ ID NO: 2834 - protein, 607 aa, Unknown
  Description of Unknown: uncultivated organism sequence
  Category: MG91 effectors
  Description: MG91-25 effector
MAKEEFVLTLPLKVEKWQADILDKRYELLRQVYNMVQQKLVRQYIYFSQQKAYRDCKSFEQKREFFENHPFHIKGVKGRNGELCDVKFPYTYRSRGGPSGKRAPNGISDFVSKLGSRKIGEDKTLADFGINSIILEELGLHIMRAWETRLYKPKSSRVSYREYGDINSFGSRKINTNFTGFTINIEDRYIAFNTNGRRGQFADFIQLPIDFSREKNGYAREALNGGIESLKKLLIVRKCIRGGNKYYLQLTISGEKPQKGRTLGKGNVGIDIGPSTIATSSLKGVHFDKLADKCDNIEHELYLINRKLDRSRRANNPQNYNEDGTIKRGIRLVWKKDKDAKRYATLKQQRKELYRKQAEIRKQQHLEMANAMLSQGDTFIVENNPIDAWVRRAKETTKTKTGKNRCKKRYGKSVANHAPSMLVSILKNKVLSLGGNFYEIDPRNAATQFDFTNGEFTKHEVSERSITLSNGCSHQRDMLSAFNLQHIVLQSKELKEYDIEQMEADYPIFCRLESAEQERFKDARHKERDALYYVGASKKQMRRNPQEKSVANRHNGGVGRKHCNTSLGNENAEITGSGLARESIERVSQVPDEYHPFGCDPIVLDGL

SEQ ID NO: 2835 - protein, 521 aa, Unknown
  Description of Unknown: uncultivated organism sequence
  Category: MG91 effectors
  Description: MG91-26 effector
MAKEVFVIEFPLKVEKWQADILNKRYEHLRRLYNYVQSKLLRQYIYFTQMQDYKKCKTLKEKKNFFKEHVFHIKGILGRNKSPLDITFTEYGILGMVTKLSQLSMGGKSYSDIGIGFTILANLADNIWAAWNKRLYDFECERISFKKYGSLDTFGSGKINNKYFCGFDLHLDRMTLDIKINGRTGKQAKFISLPIRYNMKHVDYEMNALAGGFDSIKVLTVVRRMVRGQYKYYLQMTIEGVKPQKGRHLGKGRVGIDIGPTTIAVSSNSTVSIDKLAAKCDNIEKDIQRINRKLDRSRRTMNPDNFNEDGTIKRGVRLIWNNSENYKALRRQKAELQRKQAAVRKMQHIERANSLLSEGDTFIVENNPIKGWAAKAKETKVSEKTGKIQKKKRWGKSVANHSPAMFVTILENKVKSMGGTVIKADVKNAASRYDFTDGSFTKHDLDERGVTLSNGDTHQRDMLAAFNLQHLIYDAEKPKQYDQLRMKSHYPRFCELEQDEIERYRNKVKKDDRCTIAASRL

SEQ ID NO: 2836 - protein, 530 aa, Unknown
  Description of Unknown: uncultivated organism sequence
  Category: MG91 effectors
  Description: MG91-27 effector
MTSQSFVIELPIAVDDAEMRTIVRKLEFARQLHNATLGTAIGQLQQMRQDTAWKQACAMPKGKERTAAFRALDRKYGLTEYDLHSVIARHREGSGRKAELGINETQKIATRVFQAINRYKLGLGGMPRFKSSKRGLHSIEGKTNKTGLKFRPEKKVLNWCGHDYRVLIDPKDDYIQRALKENERSDKYRKIKYCRLVRKRIRSSDRFFLQVVLEGTAPVKHVYAPVTERAAIDPGPQSIALFSKEFAGKIQVAGSNNFNEAVSRRLLRAMDRSLRRNNPDAYNEDGTIKKGAKLVKSKNYQRKVDRLREMHREAAAERKCRHGQTINLLLSIAGDIRIEKNSWKAFQRGHFGKSLGKSAMSGFIAQLKSKAESAGLKVTEVNPYKLKLSQYDPYTDTYRKKDLSERWQEMKAGSGQYIQRDVLSALLLYCANIEKEIHIPKVAVEQLEGAKQFLTDAGYVVLKSTSSRDQRDPRLASEPKAMTPEMARQKILRGAGDSHLPTDQELGQIRAGGKVSTWSKETFPLQRGVV

SEQ ID NO: 2837 - protein, 526 aa, Unknown
  Description of Unknown: uncultivated organism sequence
  Category: MG91 effectors
  Description: MG91-28 effector
MNEVFVLELPLQVEKYQADILNKRYEQLRQLYNYVQGKLLRQYRYFEQMKEYQACEKIKEKRDFFRSRPFQINETLKGIETPVKLSFEEYSIKGYIEKLVQKSVGANMTYADLGFTTNILDYLGAGVWAAWDKKLYDFKAKRVSFKKYGELDSFSSRRKVVRGVVYFSGMELHLDTMELAIKMNGKVGKESRFITLKMLHNPKHADYEMWALKGGVESVKVVKVVRRLVRSQYKYYVQLTIEGEKPQKGRTLGKGNVGIDLGPTTVAVSGENVVSIDKLASKCDNIQEEITRLSRKIDRSRRANNPQNFNEDGTIKRGIKLVWNDSKRYKELRRELAELRRKQAAIRKQQHIERANALLKEGDTFIVENNKISSWTTRAKETKVNEKTGKIQKKKRFGKSVANHAPSMFVSILENKVKSLGGEVVKVDTKNAASQYDFTDGSFTKHELKERNVTLSNGDIHQRDMLAAFNLQHLKYEEAEAKQYDTKAMADDYERFCQLEQEEIQRYKTKEKKDDRGTIGAEKLIK

SEQ ID NO: 2838 - protein, 524 aa, Unknown
  Description of Unknown: uncultivated organism sequence
  Category: MG91 effectors
  Description: MG91-29 effector
MTEVFVLELPLQVEKYQADILNRRYEQLRQLYNYVQGKLLRQYRYFEQMKEYQACKTFKDKKDFLKKHPFQVKGVYGSNKELLDITFDEYGIQGFVSKLGKKCVCSNTTYADLGITSTILDRLSLAVWSSWEKMLYSFQTKRLSFKKFGELDTISNRRIVARGKVCFPGMELHLEKMELAIKLNGKTGKNAKFITLPILHNPKHADYEMWALKGGIDSVKVITVVRRLVRGQYKYYVQLSIEGEKPLKGRTLGKGNVGIDLGPTTVAISGNNNVSIDKLAPKCDNTQREITRLSRKIDRSRRANNPQNFNEDGTIKRGIRLVWNDSKRYKALRRELAELQRRQAAIRKQQHIDRANELLKEGDTFIVENNSISGWAAKAKETKVSEKTGKIQKKKRFGKSIANHAPAMFVNILENKVKSLGGQVVKVDTKNAASQYDFTDNSLEKHELNERNVTLSNGDTHQRDMLAAFNLQHLKYDAKESKQYDVEAMNKDYDRFCQLEEAEIMRYKNKEKKDDRSTIGVGKL

SEQ ID NO: 2839 - protein, 353 aa, Unknown
  Description of Unknown: uncultivated organism sequence
  Category: MG91 effectors
  Description: MG91-30 effector
MKKSVSIKVAAKVNTNISDEKPKDLRNRFLSTQNYRLLSAVSRFATDYVQGIIRVNDLVEMKCNELKGQDLIDSAVCQGDCRKKFSKGAKYLFCVVDSAADVNDVAVRWNKFKLVCNTCSNDYAFNAQYEVMQLYPTVSLADVERLCAVGFLTKYIFPINLEYTESRTETEVPGYHNFYKIVKSIVKDKKHNEQITKIQLCTYGRDLFTETDYDCAMKSGVDAYGGMTFELDFYPHDSNMMTFLETYKDTKPLTYFYRVTKRIYSSRFDYVVYFPIKCTRYCKFCKASKIYAKNNPVLYCSQCGFTDAMFFKNSPLLSTVTFFDECVKSKTLKPKRIFYYDMALYKTMIKKVK

SEQ ID NO: 2840 - protein, 527 aa, Unknown
  Description of Unknown: uncultivated organism sequence
  Category: MG91 effectors
  Description: MG91-31 effector
MNEVFVLELPLQVEKYQEDILDKRFEQLRQLYNYVQGKLLRQYRYFEQTKEFQACKTIKEKRDFFRNHPFHFNGIYGNNNELFNITFDEYGVNGFVSKMAKKQVGANMTYADLGITTTLLDRLSLAIWASWEKKMYDYHTKRISFKKHGELNIFGSRKKTNGSGKKMFSGMELNLERMEVSIKLNGKVGKKAKYITLPILHNPKHVDYEMMALKGGFDSVKVITVVRRLVRGRYKYYLQMSIEGEKPKKDRTLGKGNVGIDIGPTTVAVSGENIASIDKLASKCDSIEAEKARLGRKIDRSRRANNPQNFNEDGTIKRGVRLVWNDSKRYKVLRREMTELQRRQAAIRKQQHIDRANELLKEGDTFIVENNQISGWTRKAKETKVNEKTGKIQKKKRFGKSVANHAPSMFVTILENKVKSLGGQVVKVDTKNAASQYDFTNDSFEKHELNERSVTLSNGDTHQRDMLAAFNLQHLKYDAQEKKQYDREAMTQHYDRFCKLERAEIMRYKNKEKRDDRSTIGAGELNT

SEQ ID NO: 2841 - protein, 525 aa, Unknown
  Description of Unknown: uncultivated organism sequence
  Category: MG91 effectors
  Description: MG91-32 effector
MNSDTFIMELPLIVEKFQSDELDKRFEILRRIYNMAQNKLERQFCYLSKFKEYQECTTKKAKGEFIKKHPFSFKDILDKSGNPLMITFTKYDIQGYLSKFAKLKIDSQYTYSDMGINTSMLMHMGMAIWSAWEKVIFDSKADKISYKKYGDLKSIGVDWEPKHPAGFILNLRKGELKLNLNNRQGQYARYITMKIRFGKKEHQVWYEGDALNAGEDSIRVLTIVRRKIRGRYNYYLQMTIRNNKPQKGRTLGEGRVAIDLGTSKIAVVAKDKVHLLPLSPSILSVSDELRIIQRQMDRSRRANNPHKYHEDGTVKKGNHDKWVNSKEYIRLRNMKAELERKQAAVRKQDHIALANYLLSLGNEFVIEDNDVQEWAKRKKEEKRRKSDGKNLSKAGLGKQIGNHAPSMFVTILKNKVESLGGTFVKVDNNNRATDYDFTNNTFNEHKLEERYITLGNGNRHQRDTLAAFNLYHLDTAPEKEKCYNLYEMRKHYAQFCEFEKEALLRWKGMTPKREKMKVREHERGL

SEQ ID NO: 2842 - protein, 607 aa, Unknown
  Description of Unknown: uncultivated organism sequence
  Category: MG91 effectors
  Description: MG91-33 effector
MAKEEFVLTLPLKVEKWQADILDKRYELLRQVYNMVQQKLVRQYIYFSQQKAYRDCKNFEQRRGFFEAHPFHVKSVKGKNGELCDIKFPYTYKSRGGSSGKRAPNGISDYVSKLWSHKIGQNKTLADFGINSYIMEELGLHIMKAWEDRLYKPKSKRVSFKDYGEINSFGSRNKNGNFAGFTINLDNGIITYKTNGRQGQFADLIQLPIDFSREKNGYASEALKGGIESLKKLLIVRRCIRGENKYYLQLTISGEKPQKGRTLGKGNVGIDIGPSTIATSSLNGVYFDKLADKCDNIEHELYLINRKLDRSRRANNPQNYNEDGQIKRGVRLVWKKDKDVKRYTTLKLQRKELYRKQAEIRKLQHLEMANAMLSEGDTFIVENNPIDAWVRRTKETTKTKAGKNRCKKRYGKSVANHAPAMFVSILKNKVLSLGGKFYEIDPRNAATQFDFSNGEFTKHEVSERSITLSNGRTHQRDMLSAFNLQHIVLQNKELKEYDIEQMEADYPIFCRLENTELERFKEARHKERDALYFVGASEKQMRRQPQEESVANRHNGGVGRKHCNTSLGGGNAKITGNGLARESIERVSQVPDERHLSGCVPISLDGL

SEQ ID NO: 2843 - protein, 484 aa, Unknown
  Description of Unknown: uncultivated organism sequence
  Category: MG91 effectors
  Description: MG91-34 effector
MAHKENQKAFVVTFPLRTEKWQEDRIDKMMRMLTNFYNDRQRKLVRRYIYLSHSKAYKEAKSKGVVAFKNYMKEHGFSQYGLDAFFKADTKGALYQCGLNSMFLQYLSQCAWSAWDKKLFGKGDFVKTDKVVNIFCSRNMKGSFCGFDYDLSTFTIRIKSTCTKEIICTIPFVVNKNSEYELYALSQKICRIGIVRKLIRSKYKYYVQFTFDGVPYNKGRNIGTGIVGIDPGPSKIAIVGDNKVEIAKLAPGIEEDERKTARLKRKLDRSRRATNPHMYKEDGTNIKGQRQICFSKSYNETRKQLAEAQRKLAAKRKIAHNELANTLLEYGDTFKVEANSYKSMQARTKATSMTKSGRIRSKKRYGKSIKNRAPSEFLVILKNKLLHYPNGKYYAVPASYACTQFDFTNESFTEHKISERKIVTSDGVQHNRDTLAAFNIKNAIVNETSTKKKKITKSNEFFDIVRMKASYNEFCLMERYLLSI

SEQ ID NO: 2844 - protein, 383 aa, Unknown
  Description of Unknown: uncultivated organism sequence
  Category: MG91 effectors
  Description: MG91-35 effector
MFLQYLSQCAWSAWDKKLFGKGDFVKTDKVVNIFCSRNKKERFCGFDYDLSTFTISIKSTCTKKIICTIPFVVNKKSDYELFALSQRICRIGIVRKLIRGKYKYYVQFTFDGVPYNKGRNIGTGIVGIDSGPSKIAIVGDEKVEIAKLAPNIEEDERKTARLKRKLDRSRRATNPHMYKEDGTNIKGQRQTCFSKVYNETRKQLADAQRKLAAKRKIAHNELANTLLEYGDTFKVEANSYKSMQARTKATSMTKSGRIRSKKRYGKSIKNRAPSEFLVILKNKLLHYPNGKYYAVPASYACTQFDFTNESFTEHKISERKIVTSDGVQHNRDTLAAFNIKNAIVNETSAKKKKITKSKEFFDIVRMKASYNDFCLMERYLLSV

SEQ ID NO: 2845 - protein, 530 aa, Unknown
  Description of Unknown: uncultivated organism sequence
  Category: MG91 effectors
  Description: MG91-36 effector
MTSQSFVIELPIAVDDAEMRTIVRKLEFARQLHNATLGTAIGQLQQMRQDTAWKQACAMPKGKERTAAFRALDRKYGLTEYDLHSVIARHREGSGRKAELGINETQKIATRVFQAINRYKLGLGGMPRFKSSKRGLHSIEGKTNKTGLKFRPEKKVLNWCGHDYRVLIDPKDDYIQRALKENERSDKYRKIKYCRLVRKRIRSSDRFFLQVVLEGTAPVKHVYAPVTERAAIDPGPQSIALFSKEFAGKIQVAGSNNFNEAVSRRLLRAMDRSLRRNNPDAYNEDGTIKKGAKLVKSKNYQRKVDRLREMHREAAAERKCRHGQTINLLLSIAGDIRIEKNSWKAFQRGHFGKSLGKSAMSGFIAQLKSKAASAGLKVTEVNPYKLKLSQYDPYTDTYRKKDLSERWQEMKAGSGQYIQRDVLSALLLYCADIEKEIHIPKVAVEQLEGAKQFLTDAGYVVLKSTSSRDQRDPRLASEPKAMTPEMARQKILRGAGDSHLPTDQELGQIRAGGKVSTWSKETFPLQRGVV

SEQ ID NO: 2846 - protein, 614 aa, Unknown
  Description of Unknown: uncultivated organism sequence
  Category: MG91 effectors
  Description: MG91-37 effector
MAKENFVLTLPLKVEKWQADILDKRYELLRQVYNMVQQKLLRQYIYFSQQKAYKECKTFQQKREFFDSHPFYIKIDDKPCEIKFPYTKKNSNTAPNTISNYVSGLGSHRVGQDKTLSNLGINSIILEELGIHIMKAWGDRIYNSKSEHISFKKYGEVNSLVSRYKKKKQTGKVYFPGFTINLEERYITYNTNGRQGNQAKLIKLPIDFSREKKRYAAEALKDGIDSIRKLSVVRRCIRGKNKYYLQLVIDGEKPQKGRTLGRGNVGIDIGPSTIATSSLLGVHFDKLADKCDNIEHELYLIDRKLDRSRRANNPQNYNEDGTYKRGVRLVWKKDSEVKRYAKLKAARKELYRRQAEIRRRQHLEMANAMLQLGDTFIVENNPIDAWARRAKETKKTKSGRTRCKKRYGKSIAHHAPAMFVTMLENKVKSLGGEFYRVDAYGYAATQFDFTNKKFTKHAVNERSITLSNGHTHQRDMLSAFNLQHARLEGEKTKSRDKEKKVESYDIEQMQADYPIFCRLEAEEQKRFRVAWHNEKDALYFVGASGKQLRHQSQEKSAANRHNGGVDRNHCNTRLGKENAEITGSGFARESIARVSQVPDEYHQHGQQSIIIDGL

SEQ ID NO: 2847 - protein, 372 aa, Unknown
  Description of Unknown: uncultivated organism sequence
  Category: MG91 effectors
  Description: MG91-38 effector
MIRNLKIECFVRDNDLHAKIRASVRLYRACLRAAFSYCALAETAGAEIVAENGNVTVKPNDEKAREILSACVGHSGKIKYYEMYHWMKELYPSLISNCYSKIQYIIGKMMTMKDQDIKKCQKKFLIVNGKRAFAQFNRSGIPIKSGMAKIDGHLLKCRWDKDIGEVEFTTNKMDSSTYYAFSSLREGWEGWSIKDSYLSFDEDKNKIVVILSYERPDTPTNIEPEKVMHVEFTDDKEMFITCYTDDKWSARPFSAAGIIGYLEEMEQIYSRYWSEFKSYERRERKQRNHVKEKLNRYTERRANAEKNNNHLWSKRIVDFARQQCAGKLVVVNLPEKTLFDLPYGWFDFKTKLDYKMKEIGGTVSFVTVDKDK

SEQ ID NO: 2848 - protein, 614 aa, Unknown
  Description of Unknown: uncultivated organism sequence
  Category: MG91 effectors
  Description: MG91-39 effector
MAKENFVLTLPLKVEKCHADILDKRYELLRQIYNMVQQKLVRQYIYFSQQKAFKACENFDQKREFFNKHPFHFKGIKGKNGELSDIKFPYTYESRSSSSGKRPSGGISDYVAKLWSHKVGADKRLVDFGLNASIMEELGLHIMKAWEDRLYKFKAKRVSFKEYGEINTLGCRLKGNFAGFTINLEEGFITFNTNGRHGKFADLIKLPIDFSREKRGYAEDALKGGVDSLRKLVIVRRCIRGRNKYYLQLTISGEKPQKGRTLGIGDVGIDIGPSTIATSSLQGVHFDKLAEKCDNIEHELYLINRKLDRSRRANNPDNYNHDGTIKRGVRLVWKKDKDVKRYASLKQQRKELFRRQAEIRKLQHLEMANAMLSQGDTFIVENNPIDAWVRRAKETKKTKTGKNRSKKRYGKSVANHAPAMFVTILENKVKSLGGVFYKVDPGYAATQFDFTNGVFTKHEVSERSITLSNGRTHQRDMLSAFNLQHARLEVEKAKSRDKEKKVESYDIGQMQADYPIFCRLETAEQERFKNARRNERDALYFVGALAKELRHAPQEETVANRHNGGVGRKHCNTLCPENAKITGNGLVRESVARVSEAPEECYHTGDQPIILDGL

SEQ ID NO: 2849 - protein, 484 aa, Unknown
  Description of Unknown: uncultivated organism sequence
  Category: MG91 effectors
  Description: MG91-40 effector
MAHKENQKAFVVTFPLRTEKWQEDRIDKMMRMLTTFYNDRQRKLVRRYIYLSHSKAYKEAKGKGVVAFKNYMKENGFSQYGLDAFFKADTKGALYQCGLNSMFLQYLSQCAWSAWDKKLFGKGDFVKTDKVVNIFCSRNKKERFCGFDYDLSTFTISIKSTCTKKIICTIPFVVNKKSDYELFALSQRICRIGIVRKLIRGKYKYYVQFTFDGVPYHKGRNIGTGIVGIDPGPSKIAIVGDNKVEIAKLAPNIEEDERKTARLKRKLDRSRRATNPHMYKEDGTIIKGQRQTCFSKVYNETRKQLADAQRKLAAKRKIAHNELANTLLEYGDTFKVEANSYKSMQARTKATSMTKSGRIRSKKRYGKSIKNRAPSEFLVILKNKLLHYPNGKYYAVPASYACTQFDFTNESFTEHKISERKIVTSDGVQHNRDTLAAFNIKNAIVNETSTKKKKITKSNEFFDIVKMKASYNEFCLMERYLLSI

SEQ ID NO: 2850 - protein, 484 aa, Unknown
  Description of Unknown: uncultivated organism sequence
  Category: MG91 effectors
  Description: MG91-41 effector
MAHKENQKAFVVTFPLRTEKWQEDRIDKMMRMLTTFYNDRQRKLVRRYIYLSHSKAYKEAKGKGVVAFKNYMKENGFSQYGLDAFFKADTKGALYQCGLNSMFLQYLSQCAWSAWDKKLFGKGDFVKTDKVVNIFCSRNKKERFCGFDYDLSTFTISIKSTCTKKIICTIPFVVNKKSDYELFALSQRICRIGIVRKLIRGKYKYYVQFTFDGVPYHKGRNIGTGIVGIDSGPIKIAIVGDNKVEIAKLAPNIEEDERKTARLKRKLDRSRRATNPHMYKEDGTIIKGQRQTCFSKVYNETRKQLADAQRKLAAKRKIAHNELANTLLEYGDTFKVEANSYKSMQARAKATSMTKSGRIRSKKRYGKSIKNRAPSEFLVILKNKLLYYPKGKYYDVPSSYACTQFDFTNESFTEHKISERRIVTSDGIQHNRDTLAAFNIKNAIVNDTSTKKKKVTKSKEFFDIVRMKASYNEFCLMERYLLSV

SEQ ID NO: 2851 - protein, 528 aa, Unknown
  Description of Unknown: uncultivated organism sequence
  Category: MG91 effectors
  Description: MG91-42 effector
MNEVFVLELPLRVEKYQADILNKRYEQLRQLYNYVQGKLLRQYRYFEQMREFQDCKTFKAKREFIKSHPFHVNGVIGRNKELLDIYFDEYGILGFVAKLGQKPIGSGMNYTDMGISSTILSNLSANIWSAWNKKLYDYRAERIAFKRHGGLNTFGSGKIVQKKDGEVKEYFPGMVLRLESMELDIKTNGKLGKNAKFITLPILHNPKHADYEMWALKGGMRSVKVLTVVRRMVRGQYKYYLQMSIEGEKPQKGRTLGKGNVGIDLGPTTVAVSGENIVSIDKLASKCDNIQKEITRLARKIDRSRRANNPQNFNEDGTVKRGIKLVWNDSKRYKELRREMAELQRRQAAIRKQQHIDRANELLKEGDTFIVENNQISGWTRKAKETKVNEKTGKIQKKKRFGKSVANHAPAMFVTILENKVKSLGGEVVKVDTQNAASQYDFTNDSFEKHELKERSITLSNGDTHQRDMLAAFNLQHLKYDDKEKKQYDTEAMKEHYERFCELEQEEIQRYKDKEKKDDRSTIGAEKL

SEQ ID NO: 2852 - protein, 524 aa, Unknown
  Description of Unknown: uncultivated organism sequence
  Category: MG91 effectors
  Description: MG91-43 effector
MIEVFVLELPLQVEKFQADILNKRFEQLRQLYNYVQGKLLRQYRYFEQMREFQACKTIKEKRDFFRTHPFHINGVLDRRGDLLDITFDEYGIQGFVEKIIHKSVSTNTSYADLGFNTLILDYLSASIWSAWDNKLYNLKTKHISFKKYGELDSFSTRKKLVKEKLYFSGIELHLDKMELAIKMNGKVGKNAKFITLKMLHNPKHADYEMWALKGGVDSVKVVKVVRRLVRSQYKYYVQLTIEGEKPQKGRTLGKGNVGIDLGPTTVAVSGENVVSIDKLASKCDNIQEEITRLSTKIDRSRRANNPQNFNEDGTIKRGIKLVWNDSKRYKELRRELAELRRKQAAIRKQQHIDRANALLKEGDTFIVENNQISGWATRAKETKVNEKTGKIQKKKRFGKSIANHAPSMFVSILENKVKSLGGEVVKVDTKNAASQYDFTDGSFTKHELKERNVTLSNGDTHQRDMLAAFNLQHLKYDEKDTKQYDTEAMTADYERFCQLEQEEIQRYKNKEKKDDKGTIGAEKL

SEQ ID NO: 2853 - protein, 527 aa, Unknown
  Description of Unknown: uncultivated organism sequence
  Category: MG91 effectors
  Description: MG91-44 effector
MNEVFVLELPLQVEKYQEDILDKRFEQLRQLYNYVQGKLLRQYRYFEQTKEFQACKTIKEKRDFFRNHPFHFNGIYGNNNELFNITFDEYGVNGFVSKMAKKQVGANMTYADLGITTTLLDRLSLAIWASWEKKLYDYHTKRISFKKHGELNIFGSRKKTNGSGKKMFSGMELNLERMEVSIKLNGKVGKKAKYITLPILHNPKHVDYEMMALKGGFDSVKVITVVRRLVRGRYKYYLQMSIEGEKPKKDRTLGKGNVGIDIGPTTVAVSGENIASIDKLASKCDSIEVEKARLGRKIDRSRRANNPQNFNEDGTIKRGVRLVWNDSKRYKVLRREMTELQRRQAAIRKQQHIDRANELLKEGDTFIVENNQISGWTRKAKETKVNEKTGKIQKKKRFGKSVANHAPSMFVTILENKVKSLGGQVVKVDTKNAASQYDFTNDSFEKHELNERSVTLSNGDTHQRDMLAAFNLQHLKYDAQEKKQYDREAMTQHYDRFCKLERAEIMRYKNKEKRDDRSTIGAGELNT

SEQ ID NO: 2854 - protein, 615 aa, Unknown
  Description of Unknown: uncultivated organism sequence
  Category: MG91 effectors
  Description: MG91-45 effector
MAKEVFVLTLPLKVEKWQADILDKRYELLRQTYNMVQQRLLRQYIYFSQQKAYKACETFVQRRDFFASHPFHFKGIKGKNGESSDIKFPYTYESRSSNTGKRPSGGISDYVSKLWSHRVGQDKTLADFGINSYLLEELGLHIMKAWEKRLYDPQSSHVSFKKYGDVNSFGSRYKKDKKSNRITFPGFAIDLVKGYIVYNTEGKRVKTNPFVLPIDFSREKKEYALESLKGGVDSIRKLLIVRRCIRGRNKYYLQLSIKGEKPQKGRTLGKGNVGIDIGPSTIAVSSLQGVHFDKLANKCDNIEHELHLLNRKIDRSRRANNPQNYNEDGTVKRGVRLVWKKDKDAKRYANLKQIRKELHRRQAAIRKQQHLEMANALLSQGDTFIVENNPVDAWVRRAKETTKTKTGKNRCKKRFGKSVANHAPATFVSILKNKVLSLGGQFHEVDIHNAATQFDFTSQQFTKHELGERSVKLSNGNTHQRDMLSAFNLQHLRAQSEENKDYDIEQMKADYPIFCKLETAEKERIKGERSVERDVLFYIGASTQDMRQQPQKSTVVNRHNGGVGRKHCNTRLGSRKKENAEITGSGLVRESIERVSQVPDEYHHFGIQSVILDGL

SEQ ID NO: 2855 - protein, 605 aa, Unknown
  Description of Unknown: uncultivated organism sequence
  Category: MG91 effectors
  Description: MG91-46 effector
MIEEFVLTLPLKVESWQADILNNRYEHLRRIYNMVQRKLLRHYIYLSQQNEYRQCKDNDEKRTFWENHPITFKDFCDKNGNPAIVKFPYTYSHRSKDSGKKASNGISDFVPKFKNRNIGGGLTYGSLGINASILENLGLRIEQAWKKRLYDPKSKHISFKEEGDLNTLGCREKNGFSGFVLDLQKMTLSFNTNGRQGKSAKFIHFPINAGKELTEYEMYALKGGIGSIRKIVVSREYVRGRYKYYVQLTIKGEKPQKNRTLGKGTVGIDVGPSTVAVSSLHGVSLDKLADKCDNIEHDLWRINRKMDRSKHETNPDFFNEDKTYKKPEKGERRKWTFSNRYKRLKLERRELYRKQAAISKQQHIDMANALLSQGDEFIVENNPIDSWAKRAKETKRGKNGKIRCKRRFGKSVAHHAPAMFVSILQNKVRSLGGTFHKVEIKNAATQFDFTNGEFTKHELNERTVTLSNGRTHQRDMLSAFNLQHLRPDSEETKDYNIEQMEADYPVFCKLEEKGIAQFKEKRQQERDVAYFTGVSHKTLKFSSANRHNGGVGRKNCNHHAGSKRNVAETGNKSSSKEYCESMETVSLVPNEYHHSNHQHLRLDGL

SEQ ID NO: 2856 - protein, 533 aa, Unknown
  Description of Unknown: uncultivated organism sequence
  Category: MG91 effectors
  Description: MG91-47 effector
MNEVFVLELPLRVEKYQADILNKRYEQLRQLYNYVQGKLLRQYRYFEQMREFQDCKTFKAKREFIKAHPFQISGISGSNKQPLDITFDEYGIRGFVEKLAQKSAGPNVTYADLGFTTYILDHLSVSIWSAWDKMLYDYHAKRVSFKKYGELDSFSSRRKIVGGKVYFSGMELHLDTMELSVKLNGKQGANAKFITLPILHNPKHADYEMWALKGGLVSVKVVKVIRRMVRSQYKYYVQLTIEGEKPQKGRTLGKGNVGIDLGPTTVAVSGDNIVSIDKLASKCDNIQKEITRLARKIDRSRRANNPQNFNEDGTVKRGIKLVWNDSKRYKELRREMAELQRRQAAIRKQQHIDRANELLKEGDTFIVENNQISGWTRKAKETKVNEKTGKIQKKKRFGKSVANHAPAMFVNILENKVKSLGGEVVKVDTQNAASQYDFTNDSFEKHELKERSITLSNGDTHQRDMLAAFNLQHLKYDDKEKKQYDTEAMKEHYERFCELEQEEIQRYKDKEKKDDRSTIGAEKLHMNDGTVKK

SEQ ID NO: 2857 - protein, 650 aa, Unknown
  Description of Unknown: uncultivated organism sequence
  Category: MG91 effectors
  Description: MG91-48 effector
MSEKSLIVYSASLKDKKISNILDSNSIPLVYLHNIKIDILNKITNNVLKYFNTNIKGIIKSNNIDEYTKKFNIFNKKIISHPDFDKFRLNIKNNIKNNILSLPTLIKTPEFFIHEKRIDGNKQLVNTGRTITKQLLINMCGGDNAIDYTNYLNKPIKKFSIIKYYNYLFISKKEVNLTGILEMQLNSNEEENLSNFKIKCKEYFSKIDVENDEFIRVILNVTYVNDKRDKIITYITTESKNQSNYYNFVNNLKFAMFIDNETSRFTNNQISKTKYSKLHEHIDYYNYTLRIEKTAINKDTGIRKDPIPYKYEKWDNEQYKYNSIKITKGIMFYKLDDTYNHKTRNKYNIVFKLNKFFKNKLTYDSYKNLLKNNQIFDNKANINDIEFEIELIVPKDINIQTFRLVRLIKSCDIWDAHFTFEDDNKYYTNSNNNVYFDRNINNLIGIDDNSELYNIDMPQHNKKSKKLYFKIKNIQKRLSKNNNEINNKILKKYNKKRTNYKKTILQQECKKIVEKGGNIYLEKNNISNMTKSAKGNSLNNGKNVRAKSKLNRKLLDSNFKFIEEQLEKNTKRYGKKFVPINTNHSPSQHCPNCNTKYEKTNNYTYRTCSSCNLSFDRDIAANINNIKENKGHTSQQIQNHINKYKNKKIK

SEQ ID NO: 2858 - protein, 535 aa, Unknown
  Description of Unknown: uncultivated organism sequence
  Category: MG91 effectors
  Description: MG91-49 effector
MATENFVLELPLKVEKWQADILNKRYEYLRQIYNYVQRKLIRQYRYFEQMDEFRQCTTYKEKREFFKSHPFYFKDIVGRNGEPFAIKFPYSMSASSGSKMDGFSGYIAKLGKLPAGANKSYSDLGINSFMLERLASNMWAAWNKYLYDRDSKRVSFKKYRDLNTFGSRKANNTTFIGMEIHLDSMEVIIKTNGKLGKYAKYITLPIDYKHSMTEYEMFALKGGFDSIKILNVVRKEIRGREKYYVQLTIEGEKPQKGRMLGKGNVGIDLGPSTIAVSSRQKVSIDKLANKCDDIQRDLYVVSRKMDRSRKANNPQNFNEDGTIKPISRKNGERRYWNDSKRYERLRSERKELLRKQAAIRKLQHIETANALLELGDTFIVENNPVSGWTRKSKETKLNKKGRIQSKKRFGKSVANHAPAMFSTILENKVKSLGGQFKKVDVKNAASRFDFTNGEFTEHKLNERVITLSNGDKHQRDLMAAFNLQHLNLDGDLSKDYDVEMMQRDYPDFCRLEREEMDMYLQGIKKNERTTIGAFK

SEQ ID NO: 2859 - protein, 528 aa, Unknown
  Description of Unknown: uncultivated organism sequence
  Category: MG91 effectors
  Description: MG91-50 effector
MNEVFVLELPLQVENYQADILNKRYEQLRQLYNYVQGKLLRQYRYFEQTKEFQECKTFKAKREFIKAHPFQIKGVLGRNKKLLDIFFDEYGILGLVAKLGQKPIGSRKTYTDMGISSTILANLSDNIWSSWNKKLYDYHANRVSFKKFGELNTFGSGKIIQKKDNEVKEYFPGMVLHLDKMEIDIKTNGALGKKATFITLPILHNPKHADYEMMALAGGSRSIKVLNVVRRLVRGQYKYYLQMTIEGEKPQKGRTLGNGNVGIDLGPTTVAVSGENVVSIDKLASKCDNIQEEITRLSRKIDRSRRANNPQNFNEDGTIKRGIKLVWNDSKRYKELRRELAELRRKQAAIRKQQHIDRANALLKEGDTFIVENNQISGWTTRAKETKVNEKTGKIQKKKRFGKSVANHAPSMFVSILENKVKSLGGEVVKVDTKNAASQYDFTNGSFTKHELKERNVTLSNGDTHQRDMLAAFNLQHLKYDEKDTKQYDTEAMTADYERFCQLEQEEIQRYKNKEKKDDRSTIGAEKL

SEQ ID NO: 2860 - protein, 490 aa, Unknown
  Description of Unknown: uncultivated organism sequence
  Category: MG91 effectors
  Description: MG91-51 effector
MARENENSGCFVVTFPLKTEKWQEDRIDKILTLLTVRYREKQKILLDRYIHLSHSPEFKEAKNAGLKALRDFMNEHKFTKYDVEKVFSDSSLSKSVTTDIMLTHGINSSIMQELSHRAWSAWEKKLYGQGKFIKLDNEVNIFKSRLKGSTITGFEYSFTDMTLSMNATKPKKHTMFTIPFVVNRKSEYEAYAMDCEVRNIAIMRQQIRGKNKYYVQFSFAGTPYNKGRKIGTGIVGIDPGPSKIAIVSDSEIRITTLAPSVNRDERAICRMQRKLDRSRRATNPDNYNDDGTIKRGIKLTFEKSNSYKRTQTKLADTQRKLAAKRKIDHNILANEIIAMGNEFHVENNSFKSMQARSKETKKNDKGKNMSKKRFGKSLANRAPSELLTILKNKVNQYADGDYVDIPSGVACTQFDFTNGEFTKHELKERTITTSDGVVHDRDALAAFNMRFVHKKKIEGKKKIEKDKENFDILAMTEAYRQFCSLEKNIK

SEQ ID NO: 2861 - protein, 518 aa, Unknown
  Description of Unknown: uncultivated organism sequence
  Category: MG91 effectors
  Description: MG91-52 effector
MDKEVFVIEFPLNVEKWQADILNKRYEHLRTLYNYVQGKLLRQYIYFAQMGEYKNCKTPKERREFFKTHAFHIKGISGRNNITFTEYGIHSLVTKLAQHRIGADCTYRDKGINSMILDHMAAYIWSSWNKKLYDINARRISFKNFGEINTFGVRKINGARFCGLNLHLDIMTLDIKINGKNGQQAKFISLPVRYNLKHAGYEMNALAGGFDSIKVLTVVRRMVRGRYKYYLQMTIEGVKPQKGRHLGNGRVGIDIGPTTIAVSSNSTVSIDKLAAKCDNIEQDIQRIGRKIDRSRRAMNPDNFNADGTVKRGVRLTWVKSERYKALCQEKAELQRKQAAIRKAQHIERVNTLISEGDTFIIESNPIKGWTARAKETKVSEKTGRFQKKKRWGKSVANHAPSMFVTILENKVKSLGGTVIKADVKNAASQYDFTDGTFTKHELDERGVTLSNGDTHQRDMLSAFNLQHLIYDTKELKQYDQQQMEIHYPRFCELEQQEIEKYKQRIKTDDRSTIAASRL

SEQ ID NO: 2862 - protein, 528 aa, Unknown
  Description of Unknown: uncultivated organism sequence
  Category: MG91 effectors
  Description: MG91-53 effector
MKEVFVLELPLRVEKYQADILNKRYELLRQLYNYVQGKLLRQYRYFEQMKDYQICKTFKDKREFIKAHSFHINGVLGRNKELLDISFDEYGIMGLVTKLGQKLIGSGKTYTDMGISSTILANLSDNIWSSWNKKLYDYHADRITFKKYGSLNTFGSGKIVQKKDNEVKEYFPGMVLHLERMEIEIKTNGGLGKKATFITLPILHNPKHADYEMMALAGGSSSIKVLTIVRRLVRGQYKYYLQMSIEGEKPQKGRMLGKGNVGIDLGPTTVAVSGENIACIDKLASKCDNIQAEITKLARKIDRSRRANNPQNYNEDGTIKRGIKLVWYDSKRYKELRRELAELRRKQAAIRKQQHIDRANALLKEGDTFIVENNQISGWTTRAKETKVNEKTGKIQKKKRFGKSVANHAPSMFVTILENKVKSLGGQVVKVDTQNAASQYDFTNDSFTKHELKERNVTLSNGDTHQRDMLAAFNLQHLKYDEKEKKQYDKEAMKAHYEHFCELEQEEIQRYKNKEKKDDRSTIGAEKL

SEQ ID NO: 2863 - protein, 524 aa, Unknown
  Description of Unknown: uncultivated organism sequence
  Category: MG91 effectors
  Description: MG91-54 effector
MEEVFVLELPLQVEKYQADILNKRYEQLRQLYNYVQGKLLRQYRYFEQMSEFQGCKTIREKRDFFRSHPFHIKGKLAGNKELPEITFDEYGINGFVEKLAQKSAGSNTTYADLGFTTYILDHLSTSIWAAWEKMLYDYRAKRISFKKYGELDSFSSRRKVVGGKVYFSGMELHLDTMELAIKLNAKQGKNAKFVTLRILHNPKHADYEMWALKGGLESIKVVKVVRRLVRGQYKYYLQMSIEGEKPKKGRTLGKGNVGIDLGPTTVAVSGENIASIDKLASKCDNIQEEITRLARKIDRSRRANNPQNFNEDGTIKRGVRLVWNDSKRYKALRREMAELQRRQAAIRKQQHIERANELLKEGDTFIVENNQISGWTRKAKETKVNEKTGKIQKKKRFGKSVANHAPSMFVTILENKVKSLGGEVIKVDTQNAASQYDFTNNSFEKHELKERSVTLSNGDTHQRDMLAAFNLQHLKYDKQEKKQYDTEAMAQHYERFCELEQEEIMRYKNKEKKDDRSTIGAGEL

SEQ ID NO: 2864 - protein, 609 aa, Unknown
  Description of Unknown: uncultivated organism sequence
  Category: MG91 effectors
  Description: MG91-55 effector
MAKEEFVLTLPLKVEKWQADILDKRYELLRQVYNMVQQKLVRQYIYFSQQRVYKDCKNFEQRRKFFEDHPFHIKGVKGRNGELCDIKFPYTYKSRGGSSGKRSPNGISDFVSKLWSHKIGQDKTLADFGINSSIMEELGLHIMKAWEYRLYKPKSKRVSFKEYGEINSFGSRKKNGIFGGFTLDLEKGYITYKYRKRNEKGDRTDFIQLPIDFSREKKGYPKEALKGGIDSLKKILIVRRCIRGGNKYYLQLTISGEKPQKGRTLGRGNVGIDIGPSTIATSSLKGVHFDKLADRCDNIEHELYLINRKLDRSRKANNPQNYNEDGTIKRGVRLVWKKDKDVKRYAALKRQRKELYRRQSEIRKLQHLEMANAMLSQGDTFIVENNPIDAWVRRAKETTKTKTGKNRCKKRYGKSVANHAPSMFVSILKNKVLSLGGNFYEIDLRNAATQFDFTNGEFTKHEVGERSITLSNGQTHQRDMLSAFNLQHIVLQSKELKEYDIEQMEADYPIFCKLEAAEQERFKEARRKERDALYYVGASKKQMRRQPQEESVANCHNGGVGRKHCNTSLGNENAEITGSGLARESIERISQVPDECHHFGCDPIVLDGL

SEQ ID NO: 2865 - protein, 536 aa, Unknown
  Description of Unknown: uncultivated organism sequence
  Category: MG91 effectors
  Description: MG91-56 effector
MEKENFVVELPLKVEKWQADLLDKRYELLRGIYNYVQSKLLRQFRYFEQMSEWKKCKTKKDKQKFMETHPFTIRGFKKPIILCKMKSKDNKADVYGVTNFVEQIVKNKVSADKTYKDFGINTTNINALAQHIWSAWEKKLYGKPKIIKDKKTGESIKIPNKIHFKKSGDINTISLREKNGKFTGLDVDLEHMVLYFNTNGKIGAKSKKITLPIVFSNPTEYEMYSFKNGIESVRVVTIVRKLIRGKYKFYVQFTIEGEKPQKGRTLGKGEVGVDVGPSTIAVSSLSGVQINTLAEKCDNIEHACKLLERKMDRSKRATNPQNYNDDGTIKKIKSKKIKWNYSNRYIKTRNKKCELHRKQAAIRKLQHNIDCNELLKLGKIFIVENNPISAWQRKATETKINKKGKYQSKKRFGKSIANHAPAMFITILENKVKSLGGQLIRVDIRNAASRFDFTNSDFVEHKLNERKITLSNGNTHQRDLLAAFNLQHLRYNNENLKTYNIKDMERDYPIFCKLETIEINKFINSQKKSHKSTIGY

SEQ ID NO: 2866 - protein, 609 aa, Unknown
  Description of Unknown: uncultivated organism sequence
  Category: MG91 effectors
  Description: MG91-57 effector
MAKENFVLTLPLKVEKWQADILDKRYELLRQVYNMVRQKLLRQYIYFSQQKAYKECGKDTKKKGKFFAEHPFFIKIDGKPCEVKFPTWKKSNQTASNSIAKYVSKLSSYKLGQDKTLSDFGINSYILEELGARIMKAWEDRLYKFKAKHISKREYGDVNSFSTRIKKSDNKISYPGFTINLEEGYITYNTNGRRGGFANLIKLPIDFSREKKGYAVEALKGGLESIREISVVRKYIRGKNKYYLQLTIDGEKPQKGRTLGRGNVGIDIGPSTIATSSLMGVHFDKLADKCDDIEHELYLVNRKLDRSRRATNPQNYNTDGTFKTIKNRERRVWNYSNRYNKLKLVRKELFRRQAEIRKQQHLAMANALLSQGDTFIVENNPIDAWVRRAKETSKNKKGNYRCKKRYGKSVAHHAPAMFVSILENKVKSLGGELHKVDVGYAATQFDFTNGEFTKHAVNERSITLSNGHTHQRDMLSAFNLQHARLKTDSRNIEKTVDNYDIEQMNADYPIFCRLETAEQERFKAIRHYERDALFFVGVSNKHLRCQPQEETVANRHNGGVGRKDCNISLGSENAEITGNGLIRESIARVSQVPDECHPFAGKPIVLDGL

SEQ ID NO: 2867 - protein, 484 aa, Unknown
  Description of Unknown: uncultivated organism sequence
  Category: MG91 effectors
  Description: MG91-58 effector
MAHKENQKAFVITFPLRTEKWQEDRIDKMMRMLTTFYNDRQRKLVRRYIYLSHSKAYQEAKGKGVVAFKNYMKENGFSQYGLDAFFKADTKGALYQCGLNSMFLQYLSQCAWSAWDKKLFGKGDFVKTDKVVNIFCSRNMKGRFCGFDYDLSTFTIRIKSTCTKEIICTIPFVVNKNSEYELYALSQKICRIGIVRKLIRSKYKYYVQFTFDGVPYNKGRNIGTGIVGIDPGPSKIAIVSDKKVEIAKLAPNIIEDERKTARLKRKLDRSRRATNPHMYKEDGTIIKGQRQTCFSKAYNKTRKQLAEAQRKLAAKRKIAHNELANTLLEYGDTFKVEANSYKSMQARTKATSMTKSGRIRSKKRYGKSIKNRAPSEFLVILKNKLLYYPKGKYYDVPSSYACTQFDFTNESFTEHKISERRIVTSDGIQHNRDTLAAFNIKNAIVNDASTKKKKVTKSKEFFDIVKMKASYNEFCVMESYLLSV

SEQ ID NO: 2868 - protein, 484 aa, Unknown
  Description of Unknown: uncultivated organism sequence
  Category: MG91 effectors
  Description: MG91-59 effector
MAHKENQKAFVVTFPLRTEKWQEDRIDKMMRMLTTFYNDRQRKLVRRYIYLSHSKAYKEAKSKGVVAFKNYMKENGFSQYGLDAFFKADTRGALYQCGLNSMFLQYLSQCAWSAWDKKLFRKGDFVKTDKVVNIFCSRNKKERFCGFNYDLGTFTISIKSTCTKKIICTIPFVVNKKSDYELFALSQRICRIGIVRKLIRGKYKYYVQFTFDGVPYNKGRNIGTGIVGIDPGPSKIAIVGDNKVEIAKLAPGIEEDERKTARLKRKLDRSRRATNPHMYKEDGTNIIGQRQIFFSKSYNETRKQLAEAQRKLAAKRKIAHNELANTLLEYGDTFKVEANSYKSMQARTKATSMTKSGRIRSKKRYGKSIKNRAPSEFLVILKNKLLHYPNGKYYAVPASYACTQFDFTNESFTEHKISERKIVTSDGVQHNRDTLAAFNIKNAIVNETSTKKKKITKSNEFFDIVRMKASYNEFCLMERYLLSI

SEQ ID NO: 2869 - protein, 621 aa, Unknown
  Description of Unknown: uncultivated organism sequence
  Category: MG91 effectors
  Description: MG91-60 effector
MRLFDYICIILLMIQSMIEEFVLTLPLKVEPWQADILNNRYEHLRRIYNMVQRKLLRHYIYLSQQNKYRQCKDNDEKRTFWETHHVTIKDFCDKKGNPAILRFPHTYYTRSKASGKRTSHGIPDLLPKLKNRNIGSGLTYASLGINAAILENLGLRIEQAWKKRLYDHKSKHISFKEEGDLNTFGCREKDGFSGFVLDLQKMKLSFNTNGRQGKSAKFIHFPINAGKELTEYEMYALKGGIGSVRKIIVAREYVRGRYKYYVQLTIKGEKPQKNRTLGKGTVGIDVGPSTVAVSSLHGVSLDKLADKCDNIEHDLWRINRKMDRSKRDTNPDFFNEDKTYKKPEKGERRKWTFSNRYKRLKLKRRELYRKQAAIRKRQHIEMANALLSQGDEFIVENNPIDSWTKRAKETKRGKNGKIRCKRRFGKSVAHHAPAMFVSILQNKVRSLGGTFHKVEIKNAATQFDFTNGEFTKHELNERTVTLSNGRTHQRDMLSAFNLQHLRTNSEELKDYDIEQMEADYPVFCKLEEKGIAQFKEKRQQERDVAYFTGVSHKTLKFSSANRHNGGVGRGNCNYHAGSKRNVAKTGNKSSSKENCESMETVSLVPNEYHHSNHQPFRLDGL

SEQ ID NO: 2870 - protein, 517 aa, Unknown
  Description of Unknown: uncultivated organism sequence
  Category: MG91 effectors
  Description: MG91-61 effector
MKKKSTEETFIMELPLKVEKFQADELNKRFELMRRIYNSAQNKLERQHEYLLSFKEYKECNTKKAKGEFINNHPFSFKGVLNKNGEPMNITFTEFGLKSYLADFAKKKVDSQYTYSDFGINTSMLMSMGMAAWSAWKKVIYDPKAKDIHYKKYGDLKSIAVDWEPKHQAGMYLDVCKGVLKLNINGRRGQYAKYLTFPIKFGRKERQLWYEGDALKGGEDSFKGLAIVRRKYNGQFRYFLQLTIRNCTPTKDRTLGKGRVAIDLGIYKIAVYTGDQVYFFPLAPNCREIDEKIAVLQRQMERSKRISNPQFYNADGTYIKAKKHEHRKWNFTKEYLKLRAMKAELQRKQAAIRKQDHIDLANHLLSFGNEFVIEDNDVKAWAERKKEEKKREKDGKNLSKKGLGKPIGSHAPAAFVTLLANKVKALRGTFTKVAVDNGATDYDFINDTFTPHELKERYITLCNGVTHQRDSLAAFNLYYIDTNPEKSRCYDRKAMKRGYKKFQELEKEALKQWKKPV

SEQ ID NO: 2871 - protein, 528 aa, Unknown
  Description of Unknown: uncultivated organism sequence
  Category: MG91 effectors
  Description: MG91-62 effector
MNEVFVLELPLQIEKYQADALNKRYEQLRQLYNYVQGKLLRQHRYFEQMKEYQACKKIKEKRIFFRSHPFQINETLKGNKIPFKVSFDEYSIKGYIEKLVQKSVGPNMTYADLGFTTNILDHLGASVWAAWDKKLYDLKAKRISFKKYGELDSFSSRRKVVRGVVYFSGMELHLDSMELAIKMNGKVGKDAKFITLKMLHNPKHADYELWALKGGVDSVKVVKVVRRLVRSQYKYYVQLTIEGEKPQKGRTLGKGNVGIDLGPTTVAVSGVNVVSIDKLASKCDNIQEEITQLSRKIDRSRRANNPQNFNEDGTIKRGIKLVWSDSKRYKELRRELAELRRKQAVIRKQQHIERANALLKEGDTFIVENNPISSWTTRAKETKVNEKTGKIQKKKRFGKSVANHAPSMFVSILENKVKSLGGRFERVSTQNAASQYDFTTDTFKTGEEKHKLNERAITLSNGDTHQRDMLAAFNLQHLKYDEKDAKQYDTEAMTADYERFCQLEQEEILRYKNKVKKDDRSTIGAEKL

SEQ ID NO: 2872 - protein, 322 aa, Unknown
  Description of Unknown: uncultivated organism sequence
  Category: MG91 effectors
  Description: MG91-63 effector
MKEVFVLELPLQVEKYQADILNKRYEQLRQLYNYVQGKLLRQYRYFEQMDEFQACKTFKEKKDFFRIHPFHIDGILNNNKELLDITFDEYGVKGFVEKLVQKPVGPNMTYADLGFTTYILDHLSSSIWSAWDRMLYDYKAKRISFKRYGELDSFSSRRKVVRGKIYFSGLELHLDSMELSIKLNGKSGKDSKFITLPILHNPKHANYELWALKGGLESIKVVKIIRRMVRSCYKYYVQLTIEGEKPQKGRIIGKGRVGIDLGPTTVAISGENVVSIDKLASQCDNIQEEITRLSRKIDRSRRANNPDNYNEDGTIKRGVKLV

SEQ ID NO: 2873 - protein, 610 aa, Unknown
  Description of Unknown: uncultivated organism sequence
  Category: MG91 effectors
  Description: MG91-64 effector
MIIFTKISEFIISYWMPVKKDDKPRFVLEMPLKVEQWQADILNVRYELMRRMYNRARRILLSHFYYMVQKDEYQECASNKRERAVYIKNHPIFIKGVTDKKGNVKPITFTEFGIKDVVLSFVTRDVGSGKTYKDFGINTSFADCVASNLWAAWEKFMYDGKCKGVAFKRRFNTISIGKNNGCFGGLKLSLESMTLSVNVNGKQKGNAKFITLPVCGDNQSEYEMQALQGGLESICVVSIARKLIRGKYKYYLQLTIKGHAPNKGRALGCGTVGVDVGPSTVAFVSQSDVQINRLASECDDIEDVIGKIQQKMDRSRRATNPQNFNEDGTLKRISRKNGERRIWNDSRRYRLLCKQKAELQRKQAAVRKMSHILKINQILSLGDTFFVENNPISQWTKRAKETKVSEKTGRYCSKKRAGKSVANHAPAMFVTLLKNKVQSLGGRCREVDIKNAASRFDFTDGQFKVHGLDERIVTLSNNKTHQRDILAAFNLQHIICVDDDKKLKKYDIARMYADYPAFCDMERAEIEKFVSGEKETDRHTIGAIEELKVVLSSHADDPSVLYSVDKLSANSEGNKTGKKAGSALVHESNDRVLEVLNESTLFTIKDLHVT

SEQ ID NO: 2874 - protein, 597 aa, Unknown
  Description of Unknown: uncultivated organism sequence
  Category: MG91 effectors
  Description: MG91-65 effector
MKAIDRSFTPAVGSSPGDGHPEMKAIDRVPPVCRNSPTGDGHPEMKAIDRLATRAEKLMSGDGHPEMKAIKTMNEVFVLELPLQVEKYQEDILDKRYEQLRQLYNYVQGKLLRQYRYFEQMKEFQACKTFKEKRDFFRAHPFHINGVYGNNNELFDITFDEYGVNGFVSKMAKKQVGANMTYADLGITTTLLDRLSLAIWASWEKMLYDYHARRISFKKHGELNIFGSRKKTNGSGKKVFSGMELNLERMEVSIKLNGKVGKKAKYIILPILHNPKHVDYEMMALKGGYDSVKVITVVRRLIRGRYKYYLQMSIEGEKPKKGRTLGKGNVGIDIGPTTVAVSGENIAYIDKLASKCDSIEAEKAKLGRKIDRSRRANNPQNFNENGTIKRGVRLVWTDSKRYKALRREMTELQRRQAAIRKQQHIDRANELLKEGDTFIVENNQVSGWTRKAKETKVNEKTGKILKKKRYGKSVANHAPSMFVTILENKVKSLGGQVVKVDIQNSASQYDFTNDTFKKHELKERSVTLSNGNTHQRDMLAAFNLQHLKYDAPEKKQYNREKMALHYDHFCKLEQEEILRYKNKEKKDDRSTIGAEKL

SEQ ID NO: 2875 - protein, 524 aa, Unknown
  Description of Unknown: uncultivated organism sequence
  Category: MG91 effectors
  Description: MG91-66 effector
MNEVFVLELPLLVERYQADILNKRYEQLRQLYNYVQGKLLRQYRYFEQMKEYKACEKIKEKRDFFRAHPFHINGVLNGNKKQLDITFDKNGINGFVEKLAQKSAGPTITYADLGFTTYILDHLSASIWAAWEKKLYDFKAKRISFKKYGELDSFSSRRKVVGGKVYFSGMELHLDTMKLSIKMNGKQGDNAKFITLKMLHNPKHADYEMWALKGGVDSVKVVKVVRRLVRSQYKYYVQLTIEGEKPQKGRKLGNGNVGIDLGPTTVAVSGENVVSIDKLASKCDNIQEEITRLSRKIDRSRRANNPQNFNEDGTIKRGIKLVWNDSKRYKELRRELAELRRKQAAIRKQQHIERANALLKEGDTFIVENNQISGWTTRAKETKVNEKTGKIQKKKRFGKSVANHAPSMFVSILENKVKSLGGEVVKVDTKNAASQYDFTDNSFTKHELKERNVTLSNGDTHQRDMLAAFNLQHLKYDEAEAKQYDTEAMAANYERFCQLEQEEIQRYKNKEKKDDRSTIGAEEL

SEQ ID NO: 2876 - protein, 605 aa, Unknown
  Description of Unknown: uncultivated organism sequence
  Category: MG91 effectors
  Description: MG91-67 effector
MIEEFVLTLPLKVESWQADILNKRYEHLRRIYNTVQRRLLRNYIYLSQQKVYRQLKDNDEKRAFWEHHPITFKDFCDRNGNPAIVKFPYTYSRRSKNSGKKASNGISDFVPKFKNRNIGSGLTYGSLGINASILEELGLRIQQAWEKRIYDSKSKRISFKEEGDLNTFGCRNKKGFSGFVLDLTHMMLSLNINGRQHQLAQYIHIPINPNKEFTEYEMYALKDGLSSVRKIIVSRVYIRGRYKYYVQLTIKGEKPQKNRTLGKGSVGIDVGPSTVAISSLKGVTLDKLADKCDDIEHDLWRINRKMDRSKRATNPDFFNKDGTYIKRKKGERRKWHFSNRYNRLKLERLELYRKQATIRKQQHIDIANALLSQGDDFIVENNPIDSWAKRAKETKRGKNGKIRCKRRFGKSVAHHAPAMFVSILQNKVHSLGGSFRKVEIKNAATQFDFTNGEFTKHELNERTVTLSDGRTHQRDMLSAFNLQHLRPESEEIKDYDIEQMEVDYPIFCKLEEQGIAIFKEKRPQDRDVAYFVGTSHKTLKISSANRHNGGVGRKNCNHHAGKRKNVAKAVTKSSSKKNCESLESVSIVPNEYHHSDNQHLRLDRL

SEQ ID NO: 2877 - protein, 614 aa, Unknown
  Description of Unknown: uncultivated organism sequence
  Category: MG91 effectors
  Description: MG91-68 effector
MPKEEFVLTLPLRVEKRHADILDKRYELLRQMYNMVQQKLVRQYIYFSQQKAYKACENFEQKRKFFNAHPFHFKGIKRKNGELSDIKFPYTYESRSSWSGKRPSGGISDYVSKLWSHKLGADKRLVDFGLNGSIMEELGLHVMKAWYDRLYKFKTKRVSFKDYGEINSFGCRLNKGNFAGFTINLEEGFITFNTNGRQGRFADIITLPIDFSREKRGYAAEALKDGVDSLRKLVIVRRCIRGRNKYYLQLTISGEKPEKGRTLGKGNVGIDIGPSTIATSSLQGVHFDKLADKCDNIEHELYIVNRKMARSRYENNRKYYNEDRTFKPREKGEIRRWKESNRFKQLKLVRRELYRKQAEIRKQQHLEMANAMLSQGDTFIVENNPIDAWVRRAKETTKTKTGKYRSKKRYGKSVANHAPAMFVTILENKVKSLGGEFHRIDPGYAATQFDFTNGVFTKHEVSERSITLSNGRTHQRDMLSAFNLQHARLDGEKEKSRDKEKKVESYDIAQMQADYPIFCRLETVEQERFKDARRNERDALYFVGAFAKELRHEPQEETVANRHNGGVGRKHCNTLCTENAKITGGLVRESIERVSEAPEECHHVGNQPIILDGL

SEQ ID NO: 2878 - protein, 510 aa, Unknown
  Description of Unknown: uncultivated organism sequence
  Category: MG91 effectors
  Description: MG91-69 effector
MFVVELPLKVEKWQSDVLNKRYELIAKIYNYAQKKLLRQYIYLTQMDEYKKCKTKKEKSNFFKNHPFYFKDITSKITFSEYDVTAFVEKIIKKNVSSDKTYKDFGINTSITECLGKHIWSAWEKKIYDKGKKISFKNKGELNTISIRKKSEYFGGLDVDIEHMILSFNINGKIKAKAKKIILPINVKNLTEYEMYALQGGYDSINVVTIIRKTIRGKYKYYVQFTIEGEKPQKGRTLGKGNVGIDIGPSTVAISSLNGVTIDTLAEKCDNIESKISDIGRKMDRSRRATNPQNFTEDGQIKRIDRKKGEKRVWKCSKRYVKLRNKKHELLRKQAVIRKLQHNIKANEILSLGDTFIVEDNPTSAWAKRAKGVRKNKNGKIQTNKRFGKSIANHAPSMFVTILQNKVDSLKGKFVKVDCKNAASRFDFTNGDFTGHNLDERKITLSNGNTHQRDMLAAFNLQHIDLTNDDLKKYNVDEMVEDYPIFCKLEKEEIGKFINGQKKSRSCTVGY

SEQ ID NO: 2879 - protein, 413 aa, Unknown
  Description of Unknown: uncultivated organism sequence
  Category: MG91 effectors
  Description: MG91-70 effector
MKENGFSQYGLDAFFKADTKGALYQCGLNSMFLQYLSQCAWSAWDKKLFGKGDFVKTDKVVNIFCSRNMKGRFCGFDYDLSTFTIRIKSTCTKKIICTIPFVVNKNSEYELYALSQKICRIGMVRKLIRSKYKYYVQFTFDGVPYNKGRNIGTGIVGIDPGPSKIAIVSDEKVEIAKLAPGIEEDERKTARLRRKLDRSRRATNPHMYKEDGTIIKGQRQTYFSKVYNETRKQLADAQRKLAAKRKIAHNELANTLLEYGDTFKVEANSYKSMQARAKATSMTKSGRIRSKKRYGKSIKNRAPSEFLVILKNKLLHYPNGKYYAVPASYACTQFDFTNESFTEHKISERRIVTSDSIQHNRDTLAAFNIKNAIVNDTSTKKKKVTKSKEFFDIVKMKASYNEFCVMERYLLSV

SEQ ID NO: 2880 - protein, 535 aa, Unknown
  Description of Unknown: uncultivated organism sequence
  Category: MG91 effectors
  Description: MG91-71 effector
MAQETFVLELPLKVEKWQADILDKRYEYLRQIYNYVQKKLIRQYKYFEQMNEFRQCTTYREKREFFRSHPFYYNEVVGRNGEPFAIKFPYSMSESNGAKLDGFNGYISKLGKLPAGANKTYADLGINSFMLERLASNMWSAWNKFLYDRDAKRVAFKKYGELNTFGSRKKNNISFIGMTIHLDTMELVIKTNGRTGRFAEYITLPIGAGKPLTEYEMYALKGGFDSIKILNVVRKQIRGNNKYYLQMTIEGEKPQKGRTLGVGCVGIDLGPSTIAVSSLQKVSIDKLANKCDDIQRDLNRVSRKMDRSRRANNPQNFNEDGTIKPVSRKNGERRVWNDSKRYRKLREERRELLRKQAAIRKAQHIETANALLPLGDTFIVENNPVSSWTRKSKETKINKKGKIQSKKRFGKSVANHAPSMFATILQNKVESLGGEFRKVEVKNAASRFDFTNGEFTEHGLGERVIALSNGDKHQRDLLAAFNLQHLNADGDTTKDYDVATMQEDYPTFCRLEREEMDLYLQGKKKNERTTIGAFK

SEQ ID NO: 2881 - protein, 524 aa, Unknown
  Description of Unknown: uncultivated organism sequence
  Category: MG91 effectors
  Description: MG91-72 effector
MKEVFVLDLPLRVEKYQSDILNKRFEQLRQLYNYVQGKLLRQYRYFEQMKEYQACKTFKEKKDFFRNHPFHINGILGSNKELLDITFDEYGIKGFVEKLVQKGVGTDMTYADLGFTTYILDHLSAGIWSAWDKMLYDYKARRISFKKYGELDSFSSRRKVVQGKVYFSGMELHLDSMMLSVKMNGKVGKAAKFITLPILHNPKHADYEMWALKGGLDSIKVVKVVRRMVRGRYKYYLQMSIEGEKPLKGRKLGKGNVGIDLGPTTVAVSGENIASIDKLASKCDSIETEKAKLGRKIDRSRRANNPQNFNEDGTIKRGIRLEWNDSKRYKELRVEMAELQRRQAAIRKQQHIDRANELLKEGDTFIVENNQISGWTRKAKETKVNENTGKIRKKKRFGKSVANHAPAMFMTILENKVKSLGGKVVKVDTQNAASQYDFTNNSFTKHELNERSVTLSNGDTHQRDMLAAFNLQHLKYDEQEKKQYDTEAMTKHYGRFCELEQAEILRYKNKEKVDDRSTIGAKEL

SEQ ID NO: 2882 - protein, 527 aa, Unknown
  Description of Unknown: uncultivated organism sequence
  Category: MG91 effectors
  Description: MG91-73 effector
MNEVFVLELPLQVEKYQADILDKRYEQLRQLYNYVQGKLFRQYRYFEQMKEYQACEKINEKKDFFRTHPFLINETLKGIKTPFMVSFDEYSIKGFIEKLAQKQVGPNMTFADLGFTTYILDHLGASVWAAWDKKLYDFKAKRISFKKYGELDSFSSRRKVVRGVVYFSGMELHLDTMELAIKMNGKVGKEAKFITLKMLHNPKHADYEMWALKGGVEIVKVVKVVRRLVRSQYKYYVQLTIEGEKPQKGRTLGKGNVGIDLGPTTVAVCGENVVSIDKLASKCDNIQEKITRLSRKIDRSRRANNPQNFNEDGTIKRGIKLVWKKDKDLKRYSKLKRELVELRRKQTAIRKQQHIDRANALLKEGDTFIVENNQISSWTMRAKETKVNEKTGRIQKKKRFGKSVANHAPSMFINILENKVKSLGGKVVKVDTKNAASQYDFTDGSFTKHELKERNVTLSNGDTHQRDMLAAFNLQHLKYDEAEAKQYDTEAMAADYERFCQLEQEEIQRYKNKEKKDDRGTIGAEKL

SEQ ID NO: 2883 - protein, 193 aa, Unknown
  Description of Unknown: uncultivated organism sequence
  Category: MG91 effectors
  Description: MG91-74 effector
MRRELAELRRKQAAIRKLQHIERANALLKEGDTFIVENNQISSWTTRAKETKVNEKTGKIQKKKRFGKSIANHAPAMFVDILENKVKSLGGEVVKVDTKNAASQYDFTDNSFTKHELKERNVTLSNGDTHQRDMLAAFNLQHLKLDEAKTKQYDTEAMNADYDRFCQLEREEILRYKNKEKKDDKGTIGAEGL

SEQ ID NO: 2884 - protein, 538 aa, Unknown
  Description of Unknown: uncultivated organism sequence
  Category: MG91 effectors
  Description: MG91-75 effector
MMVIQKCRLFVIMKEVFVLEMPLLVEKYQEDILNKRFEQLRQLYNYVQGKLLRQYKYFEQMAEFQICKTSKAKREFIKTHPFHINGVIGRNKDLLDISFDEYGILGLVTKLGQKPLGSGKSYADMGISSTILANLSNNIWSAWNKKLYDYHAKRISFKRYGELNSFGSGKIVQKKDNDVKEYFPGFILHLERMELDIKTSKSGKNETCITLPILHNPKHADYEMWALKDGSTSIKVLTIVRRLVRGRYKYYLQMSIEGEKPQKGRTLGKGNVGIDIGPTTVAVSGENIASIDKLASKCDNIQEEITRLARKIDRSRRANNPQNFNEDGTIKRGVRLVWNDSKRYKALRKEMAELQRKQAAIRKQQHIDRANALLKEGDTFVVENNPIKGWQARAKETKIDEKTGRFKSKKGRGKSIGNHAPAMFVTILENKVKSLGGEVVKVDTHNAASQYDFTNESFTDHGYDRKITLSNGDTHQRDMLAAFNLQHLKYDETEKKQYDTEAMVQHYDRFCELEQEEILRYKNKEKKDDRSTIGAGDL

SEQ ID NO: 2885 - protein, 533 aa, Unknown
  Description of Unknown: uncultivated organism sequence
  Category: MG91 effectors
  Description: MG91-76 effector
MEEVFVLELPLRVEKYQSDILNKRYEQLRQLYNYVQGKLLRQYRYFEQMREFQDCKTFKEKRDFFRSHPFHINGIMGSNKELLDITFDEYGIQGFVSKLGKKLAGTNTSYADLGITSTILDRLSLAVWSSWEKMLYSLKTKRLAFKKYGELDSLSNRRIVAKGKVCFPGMELHLEKMELAIKLNSKTGKNAKFITLPILHNPKHADYEMWALKGGIDSIKVLTVVRRLVRGQYKYYLQMSIEGEKPQKGRTLGKGNVGIDLGPTTIAVSGENVVSIDKLASKCDNIQKEITRLARKIDRSRRANNPQNFNEDGTVKRGIKLVWNDSKRYKELRREMAELQRRQAAIRKQQHIDRANELLKEGDTFIVENNQISGWTRKAKETKVNEKTGKIQKKKRFGKSVANHAPAMFVTILENKVKSLGGEVVKVDTQNAASQYDFTNDSFEKHELKERSVTLSNGDTHQRDMLAAFNLQHLKYDDKEKKQYDTEAMKEHYERFCELEQEEIQRYKDKEKKDDRSTIGAEKLHMNDGTVKK

SEQ ID NO: 2886 - protein, 528 aa, Unknown
  Description of Unknown: uncultivated organism sequence
  Category: MG91 effectors
  Description: MG91-77 effector
MNEVFVLELPLQVEKYQADILNKRYEQLRQLYNYVQGKLLRQYKYFEQMKEYQSCRTFKEKKDFFRNHPFQIKGVLGRNKELLDIFFDEYGIFGLVTKLGQKPMGSGMSYTDMGISSTILANLSYNIWSSWNKKLYDYHADRISFKKHDGLNTFGSGKIVKKKDNEVKEYFPGMVLHLDRMEIDIKTNGGLGKKTTFIALPILYNPKHADYEMMALKGGTKSIKVLTVVRRLVRGQYKYYLQLTIEGEKPQKGRTLGKGNVGIDLGPTTVAISGKNVVSIDKLASKCDNIQEEITRLSRKIDRSRRANNPQNYNEDGTIKRGIKLVWNDSKRYKELRRELAELRRKQAAIRKQQHIDRANALLKEGDTFIVENNQISGWTTRAKETKVNENTGKIQKKKRFGKSVANHAPSMFVSILENKVKSLGGEVVKVDTKNAASQYDFTDGSFTKHELKERNVTLSNGDTHQRDMLAAFNLQHLKYDEAEAKQYDTEAMAADYERFCQLEQEEIQRYKNKEKKDDRGTIGAEKL

SEQ ID NO: 2887 - protein, 528 aa, Unknown
  Description of Unknown: uncultivated organism sequence
  Category: MG91 effectors
  Description: MG91-78 effector
MEEVFVLELPLLVEKYQADILNKRYEQLRQLYNYVQGKLLRQYRYFEQMTEFQVCKTFKEKRDFLRSHPFHINGILGSNKALLDITFDDYGINGFVTKLGLKSISNEKTYADIGINSSILAKLSNNIWSSWDKMLYDNKAKRISFKKYGEINSFGCGKKTNGSGKKVFSGMELRLEKMELAIKLNSKTGKNAKFITLPILHNPKHADYEMWALKGGYDSVKVITVVRRMVRGQYKYYLQMSIEGEKPQKGRTLGKGTVGIDIGPTTIAVSGENIVSIDKLAAKCDNIEAEIQRLARKIDRSRRANNPDNFNEDGTVKRGVRLVWKKDKDCKRYAALKREMAELHRRQAAIRKQQHIDRANELLKEGDTFIVENNQISGWVRRAKETKVSEKTGRIQKKKRFGKSVANHAPSMFVTILENKVKSLGGEVVKVDTQNAASQYDFTNNSFEKHELNERSVTLSDGKKHQRDMLAAFNLQHLKYGESEKKQYDTEAMNQHYERFCELEHEEIMRYKNKEKKDDRSTIGAGDC

SEQ ID NO: 2888 - protein, 528 aa, Unknown
  Description of Unknown: uncultivated organism sequence
  Category: MG91 effectors
  Description: MG91-79 effector
MNEVFVLELPLQIEKYQADALNKRYEQLRQLYNYVQGKLLRQYRYFEQMKEYQACKKIKEKRFFFRSHPFQINETLKGNKIPFKVSFDEYSIKGYIEKLVQKSVGPNMTYADLGFTTNILDHLGASVWAAWDKKLYDLKAKRISFKKYGELDSFSSRRKVVRGVVYFSGMELHLDSMELAIKMNGKVGKDAKFITLKMLHNPKHADYELWALKGGVDSVKVVKVVRRLVRSQYKYYVQLTIEGEKPQKGRTLGKGNVGIDLGPTTVAVSGVNVVSIDKLASKCDNIQEEITQLSRKIDRSRRANNPQNFNEDGTIKRGIKLVWSDSKRYKELRRELAELRRKQAVIRKQQHIERANALLKEGDTFIVENNPISSWTTRAKETKVNEKTGKIQKKKRFGKSVANHAPSMFVSILENKVKSLGGRFERVSTQNAASQYDFTTDTFKTGEEKHKLNERAITLSNGDTHQRDMLAAFNLQHLKYDEKDAKQYDTEAMAADYERFCQLEQEEILRYKNKVKKDDRGTIGAEKL

SEQ ID NO: 2889 - protein, 521 aa, Unknown
  Description of Unknown: uncultivated organism sequence
  Category: MG91 effectors
  Description: MG91-80 effector
MNEVFVLELPLQVEKYQADILNKRYEQLRQLYNYVQGKLLRQYKYFEQMKEYQACKAFKEKKDFFRSHPFQINETLKGNETALKVSFDEYSIKGYIEKLVQKSVGQNMNYADLGFTTNILDHLGASIWAAWDKKLYDFKAKRISFKKYGELDSFSSRRKVVGGKVYFSGMELYLDTMELAIKMNGKVGKEAKFITLKMLHNPKHADYEMWALKGGVESVKVVKVVRRLVRSQYKYYVQLTIEGEKPQKGRTLGKGNVGIDLGPTTVAVSGENIVSIDKLASKCDNIQEEITRLSRKIDRSRRANNPQNFNEDGTIKRGIKLVWNDSKRYKELRRELAELRRKQAAIRKQQHIDRANALLKEGDTFIVENNQISGWTTRAKETKVSEKTGKIQKKKRFGKSVANHAPSMFVSILENKVNSLGGQVVKVDTQNAASQYDFTDGSFTKHELKERNVTLSNGDVHQRDMLAAFNLQHLTGEKRQYDVEAMKRDYERFCQLEQEEIQRYKNKEKKDDRGTIGAEKL

SEQ ID NO: 2890 - protein, 605 aa, Unknown
  Description of Unknown: uncultivated organism sequence
  Category: MG91 effectors
  Description: MG91-81 effector
MVEEFVLTLPLKVEPWQADILNNRYEHLRRMYNMVQRKLLRHYIYLSQQKAYRQCKDNDEKRTFWENQPITFKDLCDKNGNPAIVRFPHTYYTRSKASGKRTSNGIPDLLPKFKNRNIGSGLTYASLGINAAILENLGLRIEQAWKKRLYDPKSKHISFKDEGDLNTFGCREKDGFSGFVLDLPRMMLSFNINGKQKSQAKFIHLPINAGKELTEYEMYALKGGLDSIRKIIIAREYVRGRYKYYVQLTIKGEKPQKNRTLGNGSVGIDVGPSTVAISSLQGVTLDKLADKCDDIEHDLWRINRKMDRSKRKTNPDFFNDDKTYKKRKRGERRIWHFSKRYKRLKLERRELYRKQAAIRKQQHIDMANALLSQGDEFIVENNPIDSWAKCAKETKKNKNGKNRCKRRFGKSIAHHAPAMFISILHNKVRSLGGSFSKVEIKNAATQFDFTNGEFTKHELNERIVTLSDGRTHQRDMLSAFNLQHLRPESEEIKDYDIEQMEVDYPIFCKLEEQGIAIFKEKRPQDRDVAYFVGTSHKTLKISSANRHNGGVGRKNCNHHAGKRKNVAKAVTKSSSKKNCESLESVSVVPNEYHHSDNQHLRLDRL

SEQ ID NO: 2891 - protein, 525 aa, Unknown
  Description of Unknown: uncultivated organism sequence
  Category: MG91 effectors
  Description: MG91-82 effector
MNNETFIMELPLIVEKFQSDELDKRFEILRRIYNMAQNKLERQFCYLSKFKEYQECTTKKAKGEFIKKHPFSFKDILDKSGNPLMITFTKYDIQGYLSKFAKLKIDSQYTYSDMGINTSMLMHMGMAIWSAWEKVIFDSKADKISYKKYGDLKSIGVDWEPKHPAGFILNLQKGELKLNLNNRQGQYARYITMKIRFGRKEHQVWYEGDALNAGEDSIRVLTIVRRKIRGRYNYYLQMTIRNNKPQKGRTLGEGRVAIDLGTSKIAVVAKDKVHLLPLSPSILSVSDELRIIQRQMDRSRRANNPQKYHEDGTVKKGNHDKWVNSKEYIRLRNMKAELERKQAAVRKQDHIALANYLLSLGNEFVIEDNDVQEWAKRKKEEKRRKSDGKNLSKAGLGKQIGNHAPSMFVTILKNKVESLGGTFVKVDNNNRATDYDFTNNTFNEHKLEERYITLGNGNRHQRDTLAAFNLYHLDTAPEKEKCYNLYEMRKHYAQFCEFEKEALLRWKGMTPKREKMKVREHERGL

SEQ ID NO: 2892 - protein, 490 aa, Unknown
  Description of Unknown: uncultivated organism sequence
  Category: MG91 effectors
  Description: MG91-83 effector
MARENENSGCFVVTFPLKTEKWQEDRIDKILTLLTVRYREKQKILLDRYIHLSHSPEFKEAKKTGLKAFRDFMNEHNFTKYDVEKVFSDSSLSKSVTADIMLTYGINSDIMQELSHRAWSAWEKKLYGQGKFIRLDNEVTLFKSRSHKGNVTGFEYSFTEMTLSMNATKPKKHTMFTIPFVVNRKSEYEAYALGCEVKNIAIMRQQIRGKNKYYVQFSFAGTPYNKGRKMGTGIVGIDPGPSKIAIVSDSEIRITTLAPSVTKDEKAVCRLQRKLDRSRRATNPDNYNDDGTIKRGIKLKFEKSNSYKRTQTKLADMQRKLAAKRKIDHNILANEIITMGNEFRVEKNSFKSMQVRSKETKKNDKGKNLSKKRWGDSLSNHAPAELLTILKNKVCQYADGEYVDIPSSVACTAFDFTNGEFTKHPPKERTITTSDGFVHDRDALAAFNMRFVHKKKIEGKKKIEKDKENFDILAMTEAYRQFCSLEKNIK

SEQ ID NO: 2893 - protein, 528 aa, Unknown
  Description of Unknown: uncultivated organism sequence
  Category: MG91 effectors
  Description: MG91-84 effector
MEEVFVLELPLQVEKYQADILNKRYEQLRQLYNYVQGKLLRQYRYFEQMTEFQVCKTFKEKRDFFRSHPFHINGILGSNKELLDITFDDYGINGFVTKLGLKSIGNGKTYTDIGINSAILEKLSDNIWASWDKMLYDYKAKRISFKRYGELNSFGCRKKLNGSRKKVFSGMELRLDKMELAIKLNSKTGKNAKFITLPILHNPKHADYEMWALKGGYDSVKVITVVRRMVRGQYKYYLQMSIEGEKPQKGRTLGKGTVGIDIGPTTIAVSGENIVSIDKLAAKCDNIEAEIQRLARKIDRSRRANNPDNFNEDGTVKRGVRLVWKKDKDCKRYAALKREMAELHRRQAAIRKQQHIDRANELLKEGDTFIVENNQISSWVRRAKETKVSEKTGRIQKKKRFGKSVANHAPSMFVTILENKVKSLGGEVVKVDTQNAASQYDFTNNSFEKHELNERSVTLSDGKKHQRDMLAAFNLQHLKYGESEKKRYDTEAMNQHYERFCELEHEEIMRYKNKEKKDDRSTIGAGDL

SEQ ID NO: 2894 - protein, 524 aa, Unknown
  Description of Unknown: uncultivated organism sequence
  Category: MG91 effectors
  Description: MG91-85 effector
MKEVFVLELPLRVEKFQEDILNKRYEQLRQLYNYVQGKLLRQYRYFEQMKEFQACTTLKDKRDFIRTHPFHIYGVYGKNGDLFDITFDEYGINGFVAKLGKKLVGTNTTYADLGITSTILDRLSLAIWASWEKMLYSFHTKRLSFKKYGELDSLSNRRIVVRGKVCFPGMELHLEKMELAIKLNSKTGKNAKFITLPILHNPKHADYEMWALKGGIDSIKVITVVRRLVRGQYKYYLQMSIEGEKPQKGRTLGKGNVGIDIGPTTVAVSGENIASIDKLASKCDNIQEEITRLARKIDRSRRANNPENFNEDGTIKRGVRLVWNDSKRYKALRKEMAELQRRQAAIRKQQHIDRANELLKEGDTFIVENNQISGWTRKAKETKVNEKTGKIQKKKRFGKSVANHAPSMFVTILENKVKSLGGEVIKVDTQNAASQYDFTNNSFEKHELKERSVTLSNGDTHQRDMLAAFNLQHLKYDAQEKKQYDTEAMAQHYERFCELEQAEIMRYKNKEKKDDRSTIGAGDL

SEQ ID NO: 2895 - protein, 524 aa, Unknown
  Description of Unknown: uncultivated organism sequence
  Category: MG91 effectors
  Description: MG91-86 effector
MNDVFVLELPLQVEKYQADILNKRYEQLRQLYNYVQGKLLRQYRYFEQMKEYQACKTIKEKRDFFKSHPFQVNESLGGDKSAFEISFNEFSIKGFIEKLVQKSVGANMTYADLGFTTNILDHLGASVWAAWDKKLYDFKAKRISFKKYGELDSFSSRRKVVGGKVYFSGMELHLDTMELAIKMNGKQGNNAKFITLKMQHNPKHAEYEMWALKGGVDSVKVVKVVRRLVRSQYKYYVQLTIEGEKPQKGRTLGMGNVGIDLGPTTVAVSGENVVSIDKLASKCDNIQEGITRLSRKIDRSRRANNPQNFNEDGTIKRGIKLVWNDSKRYKELRRELAELRRKQAAIRKQQHIERANALLKEGDTFIVENNQISGWTTRAKETKVNEKTGKIQKKKRFGKSVANHAPSMFVSILENKVKSLGGEVVKVDTKNAASQYDFTDNSFTKHELKERNVTLSNGDTHQRDMLAAFNLQHLKYDEKENKQYDKEGMKAHYERFCKLEQEEIQRYKNKEKKDDRGTIGAKKL

SEQ ID NO: 2896 - protein, 490 aa, Unknown
  Description of Unknown: uncultivated organism sequence
  Category: MG91 effectors
  Description: MG91-87 effector
MARENENSGCFVVTFPLKTEKWQEDRIDKILTLLTVRYREKQKILLDRYIHLSHSPEFKEAKNAGLKALRDFMNEHKFTKYDVEKVFSDSSLSKSVTTDIMLTYGINSDIMQELSHRAWSAWEKKLYGQGKFIRLDNEVTLFKSRSHKGNVTGFEYSFTEMTLSMNATKPKKHTMFTIPFVVNRKSEYEAYAMDCEVRNIAIMRQQIRGKNKYYVQFSFAGTPYNKGRKIGTGIVGIDPGPSKIAIVSDSEIRITTLAPSVNRDERAICRMQRKLDRSRRATNPDNYNDDGTIKRGIKLTFEKSNSYKRTQAKLADTQRKLAAKRKIDHNILANEIIAMGNEFHVENNSFKSMQARSKETKKNDKGKNMSKKRFGKSLANRAPSELLTILKNKVNQYADGDYVDIPSGVACTQFDFTNGEFTKHELKERTITTSDGVVHDRDALAAFNMRFVHKKKVEGKKKIEKDKENFDILAMTEAYRQFCSLEKNIK

SEQ ID NO: 2897 - protein, 527 aa, Unknown
  Description of Unknown: uncultivated organism sequence
  Category: MG91 effectors
  Description: MG91-88 effector
MNEVFVLELPLQVEKYQEDILERRFEQLRQLYNYVQGKLLRQYRYFEQTKEFQACKTIKEKRDFFRNHPFHFNGIYGNNNELFNITFDEYGVNGFVSKMAKKQVGANMTYADLGITTTLLDRLSLAIWASWEKKLYDYHTKRISFKKHGELNIFGSRKKTNGSGKKMFSGMELNLERMEVSIKLNGKVGKKAKYITLPILHNPKHVDYEMLALKGGFDSVKVITVVRRLVRGRYKYYLQMSIEGEKPKKDRTLGKGNVGIDIGPTTVAVSGENIASIDKLASKCDSIEVEKARLGRKIDRSRRANNPQNFNEDGTIKRGVRLVWNDSKRYKVLRREMTELQRRQAAIRKQQHIDRANELLKEGDTFIVENNQISGWTRKAKETKVNEKTGKIQKKKRFGKSVANHAPSMFVTILENKVKSLGGQVVKVDTKNAASQYDFTNDSFEKHELNERSVTLSNGDTHQRDMLAAFNLQHLKYDAQEKKQYDREAMTQHYDRFCKLERAEIMRYKNKEKRDDRSTIGAGELNT

SEQ ID NO: 2898 - protein, 528 aa, Unknown
  Description of Unknown: uncultivated organism sequence
  Category: MG91 effectors
  Description: MG91-89 effector
MNEVFVLELPLKVEKYQADILNKRYEQLRQLYNYVQGKLLRQYRYFEQMKEFQECKSFKSKREFIKAHPFQIKGVMARNKELLDIFFDEYGILGLVTKLGQKPIGSGKTYTDMGISSTILANLSDNIWSSWNKKMYDYHADRISFKKFGELNTFGSGKIVQKKDNEVKEYFPGMVLHLDKMEIDIKTNGALGKKATFITLPILHNPKHVDYEMMALAGGSRSIKVLTIVRRMVRGQYKYYVQLTIEGGKPQKGRTLGKGNVGIDLGPTTVAVSGENVVSIDKLASKCDNIQEEITRLSRKIDRSRRANNPQNFNEDGTIKRGIKLVWNDSKRYKELRRELAELRRKQAAIRKQQHIDRANALLKEGDTFIVENNQISGWTTRAKETKVNEKTGKIQKKKRFGKSVANHAPSMFVSILENKVKSLGGEVVKVDTKNAASQYDFTDGSFTKHELKERNVTLSNGDTHQRDMLAAFNLQHLKYDEKDTKQYDTESMAADYERFCQLEQEEIQRYKNKEKKDDRSTIGAEKL

SEQ ID NO: 2899 - protein, 579 aa, Unknown
  Description of Unknown: uncultivated organism sequence
  Category: MG91 effectors
  Description: MG91-90 effector
MIEEFVLTLPLKVEKWQADILNNRYEHLRHIYNMVQRKLLRQYIYYSQQTEYRNCKSNDERREFWGNHPFTIKGICDQKGNSPIVKFPYTYSSRSKGSGKRASNGISDLLPKLKHYNIGSGKTYGSLGLNASILENLGLSIQQAWEKRLYDKKSRHISFKKEDELNTFGCRFKRGFSGINLDLSKMILSLNINGRQHNLAKYINLSINPNKKFTEYEEYALKGGISSIKKIVILREYIRGRYKYYVQLTIEGEKPQKNRTLGVGTVGIDVGPSTVAVSSLYCVSFNKLADKCDDIEHDLWLVNRKMDRSKRATNPGFFAADGTYIKRKKGERRKWKFSHRYENLRSVRRELYRKQAVVRKQQHIAMANEMLSQGDTFIVENNPVDSWTRRAKETKKNKKGKMRCKRRFGKSVVHHAPAMFVSILENKVRSLGGTFHKADIKNAATQFDFTNGELKKHELKERTVTLSNGKTHQRDMLAAFNLQHLRVDSTKDKDYDVEQMILDYPVFCKLEEQETTSFIEAKGKDKDAAYFAGISSKETNRSSNRHNGGVERKHCNNHEEKGDAAKSGKKNFQEGFPRA

SEQ ID NO: 2900 - protein, 849 aa, Unknown
  Description of Unknown: uncultivated organism sequence
  Category: MG91 effectors
  Description: MG91-91 effector
MKEEDIIKFSDSLKGLGTNKKGVALILRNPIKITEDSAVQGVIIDNKPDRKEGIDRLDYIVYDRENGMHRSPATEGNFDQEVPYHILSRFEDLMDCGKLIPVVFEDSVNPFSTDITFKHNDPLKNDKKAFWNYPLDKEQFEASSSVRFYKSVLAPRNFSESNTFNCKTEEASLYFAVENARRLSKRGSAVRDFRNKDIWTVSLDNADESKPLDVETAEFFATKSIRSSILNMGDTKVFQALFDSKKNAIAFASDYANWMTKAEIAVGKLLGFNIPSNIQDQGMDLLGGDKKYIDCYLQKNFYTEEFQERPFGELLDNTLKWIREYGANPDEENIKAVSESLDKIAFDKYVVEGIHLDYFFQEPITLDDGRKIVGFGKNLGKDNVTWAAKAYTTNADNTAVEKVDFKDLPHDGLKKAIEKLDSPYHPHIDFGDKKLNVYKMDRVAYSLYQRISNVGAKSFTPSEASQAELFFKQLPEEIRQPMAVYLENLVRKNINEKEVSLPEKWFTSAFEELEKIAKDGLPIKYNLKHADYEMTALAGGIDSIKLLTVVRRLVRGKYKYYLQITIKGKKPQKGRELGSGKVGIDLGASTIAVCGDNIVSIDKLAAKCDYIQKDVKKIQRKMDRSRRANNPDNYNENGAIKKGKKLVWKNSNRYKALCKQYAEIKRKQAAVRKIEHIERANNLLKEGNIFITEKNPIKEWAKKSEETEINPKTGKTKSKKKYGKSISVHAPGMFIEILKNKVVSLGGKFIKDNPENAASEYDFTNDTFTDHGFDRTITLSNGDKHQRDTLAAFNIKNRKYDEEEPKQYNREQMQKEYARFCELEREEIEKYKNGTKKDYRRTIAAYKLY

SEQ ID NO: 2901 - protein, 607 aa, Unknown
  Description of Unknown: uncultivated organism sequence
  Category: MG91 effectors
  Description: MG91-92 effector
MAKEEFVLTLPLKVEKWQADILDKRYELLRQVYNMVQQKLVRQYIYFSQQKAYRDCKNFEQRRGFFEAHPFHVKSVKGKNGELCDIKFPYTYKSRGGSSGKRAPNGISDYVSKLWSHKIGQNKTLADFGINSYIMEELGLHIMKAWEDRLYKPKSKRVSFKDYGEINSFGSRNKNGNFAGFTINLDNGIITYKTNGRQGQFADLIQLPIDFSREKNGYASEALKGGIESLKKLLIVRRCIRGENKYYLQLTISGEKPQKGRTLGKGNVGIDIGPSTIATSSLNGVYFDKLADKCDNIEHELYLINRKLDRSRRANNPQNYNEDGQIKRGVRLVWKKDKDVKRYATLKLQRKELYRKQAEIRKLQHLEMANAMLSEGDTFIVENNPIDAWVRRTKETTKTKAGKNRCKKRYGKSVANHAPAMFVSILKNKVLSLGGKFYEIDPRNAATQFDFSNGEFTKHEVSERSITLSNGRTHQRDMLSAFNLQHIVLQNKELKEYDIEQMEADYPIFCRLENTELERFKEARHKERDALYFAGASEKQMRRQPQEESVANRHNGGVGRKHCNTSLGGGNAKITGNGLARESIERVSQVPDERHLSGCVPISLDGL

SEQ ID NO: 2902 - protein, 524 aa, Unknown
  Description of Unknown: uncultivated organism sequence
  Category: MG91 effectors
  Description: MG91-93 effector
MKEVFVLELPLQVEKYQADILNKRYEQLRQLHNYVQGKLLRQYRYFEQMKEFQACKTFKEKKDFFRNHPFHVNGIWGSNKELLDITFDEYGINGFVEKLVQKSVGSDMTYADLGFTTNILDHLSASIWRAWDKMLYDYHAKRVSFKKYGELDSFSSRRKVVGGKVYFSGMELHLDTMVLSIKLNGKQGKSAKFLTLPILHNPKHADYEIWALKGGLDSVKVVKVVRRMVRGNYKYYLQMSIEGEKPQKGRTLGKGNVGIDLGPTTVAVSGNNVVSIDKLAAKCDNIQAEIARLGRKIDRSRRANNPHNFNEDGTIKRGVRLVWNDSKRYKALRRDMAELQRRQAAIRKQQHIDRANALLKEGDTFIVENNQISGWTRKAKETKVNEKTGKIQKKKRFGKSVANHAPAMFVTVLENKVNSLGGKVVKVDTKNAASQYDFTNGSFEKHELKERNVTLSNGDTHQRDILAAFNLQHLKYDEKEKKQYDVESMKAHYERFCYLEQAEIMRYKNKEKKDDRSTIGAEKL

SEQ ID NO: 2903 - protein, 515 aa, Unknown
  Description of Unknown: uncultivated organism sequence
  Category: MG91 effectors
  Description: MG91-94 effector
MELPLQVEKYQEDILNKRYEQLRQLYNYAQGKLLRQFRYFEQMKDYQLCKTFKEKKDFFKNHPFQINGILGSNKQPLDITFDEYGINGFVEKLVQKSAGPNITYADLGITTTILDHLSSSIWRAWDKMLYDYHAKRVSFKKYGELDSFSSRRKVVGGKVYFSGLELHLDTMKLSVKLNGKQGSNAKFITMPILYNPKHEDYELWALKGGLESVKVVKVIRRLVRSQYKYYVQLTIEGEKPQKGRTLGKGNVGIDLGPTTVAVSGENIASIDKLASKCDNIQKEITRLARKIDRSRRANNPENFNEDGTIKRGVRLVWNDSKRYKALRKEMAELQRRQAAIRKQQHIDRANALLKEGDTFIVENNQISAWVRKAKETKVNEKTGKIQKKKRFGKSVANHAPAMFVTILENKVKSLGGEVVKVDTQNAASQYDFTNDSFEKHELNERSVTLSNGDTHQRDMLAAFNLQHLTAEKKQYDREAMAQHYDRFCELEQTEIERYKNKEKKDDRSTIGAGGL

SEQ ID NO: 2904 - protein, 413 aa, Unknown
  Description of Unknown: uncultivated organism sequence
  Category: MG91 effectors
  Description: MG91-95 effector
MKENGFSQYGLDAFFKADTKGALYQCGVNSMFLQYLSQCAWSAWDKKLFGKGDFVKTDKVVNIFCSRNKKERFCGFDYDLSTFTISIKSTCTKKIICTIPFVVNKKSDYELFALSQRICRIGIVRKLIRGKYKYYVQFTFDGVPYHKGRNIGTGIVGIDPGPSKIAIVGDNKVEIAKLAPNIEEDERKTARLKRKLDRSRRATNPHMYKEDGTIIKGQRQTCFSKVYNETRKQLADAQRKLAAKRKIAHNELANTLLEYGDTFKVEANSYKSMQARTKATSMTKSGRIRSKKRYGKSIKNRAPSEFLVILKNKLLHYPNGKYYAVPASYACTQFDFTNESFTEHKISERKIVTSDGVQHNRDTLAAFNIKNAIVNETSTKKKKITKSNEFFDIVRMKASYNEFCLMERYLLSI

SEQ ID NO: 2905 - protein, 527 aa, Unknown
  Description of Unknown: uncultivated organism sequence
  Category: MG91 effectors
  Description: MG91-96 effector
MNEVFVLELPLQVEKYQADILNKRYEQLRQLYNYVQCKLLRQYRYFEQMNEYQACEKIKEKRDFFRAHPFQINEKLKGKNTPITVSFDEYSIKGFIEKLAQKQVGPNKTYADLGFTTYILDHLGASVWAAWDKKLYDFKAKRISFKKYSELDSFSSRRKVVRGVVYFSGMELHLDTMELAIKMNGKVGKDAKFITLTMLHNPKHADYEMWALKGGVDSVKVVKVVRRLVRSQYKYYVQLTIEGEKPQKGRTLGKGNVGIDLGPTTVAVCGENIVSIDKLASKCDNIQSKITRLSRKIDRSRRANNPDNYNEDGTIKRGVKLVWEKEKNLKRYSKLKRELAELRRKQAAIRKLQHIERANALLNEGNTFIVENNPVKAWVRRAKETKVDEKTGKYKSKRGSGRSVGSHAPAMFVDIMENKVKSLGGRFERVDTQNAASRFDFTDGSFTEHDRSVRAVTLSNGDTHQRDMLAAFNLQHLQLDEAKTKQYDTEAMAADYERFCQLEQEEIQRYKNREKKDDRSTIGAEKL

SEQ ID NO: 2906 - protein, 484 aa, Unknown
  Description of Unknown: uncultivated organism sequence
  Category: MG91 effectors
  Description: MG91-97 effector
MAHKENQKAFVVTFPLRTEKWQEDRIDKMMRMLTTFYNDRQRKLVRRYIYLSHSKAYKEAKGKGVVAFKNYMKENGFSQYGLDAFFKADTKGALYQCGLNSMFLQYLSQCAWSAWDKKLFGKGDFVKTDKVVNIFCSRNKKERFCGFDYDLSTFTISIKSTCTKKIICTIPFVVNKNSEYELYALSQKICRIGIVRKLIRSKYKYYVQFTFDGVPYNKGRNIGTGIVGIDPGPSKIAIVGDNKVEIAKLAPNIEEDERKTARLKRKLDRSRRATNPHMYKEDGTNIKGQRQICFSKSYNETRKQLADAQRKLAAKRKIAHNELANTLLEYGDTFKVEANSYKSMQARAKATSMTKSGRIRSKKRYGKSIKNRAPSEFLVILKNKLLYYPKGKYYDVPSSYACTQFDFTNESFTEHKISERRIVTSDGIQHNRDTLAAFNIKNAIVNDTSTKKKKVTKSKEFFDIVKMKASYNEFCLMERYLLSV

SEQ ID NO: 2907 - protein, 525 aa, Unknown
  Description of Unknown: uncultivated organism sequence
  Category: MG91 effectors
  Description: MG91-98 effector
MNEVFVLELPLQVEKFQVDILNKRYEQLRQLYNYVQGKLLRQYRYFEQMKEYQACKTFKEKKDFFRSHPFQINETLKGNETAFKVSFDEYSINSYIEKLVQKSVGSNMTYSDLGFTTNILDHLSASIWAAWNKKLYDFKAKRISFKKYGELDSFSSRRKVVRGVVYFSGIELHLDTMELAIKMNGKVGKEAKFITLKMLHNPKHAEYEMWALKGGVDSVKVVKVVRRLVRSQYKYYVQLTIEGEKPQKGRTLGRGNVGIDLGPTTVAVSGENVVSIDKLASKCDNIQEEITRLSRKIDRSRRANNPQNFNEDGTIKRGIKLVWNDSNRYKELRRELAELRRKQAAIRKQQHIDRANSLLKEGDTFIVENNQISSWTTRAKETKVNEKAGKIQKKKRFGKSVANHAPSMFVSILENKVKSLGGEVVKVDTKNAASQYDFTDGSFTKHELKERNVTLSNGDTHQRDMLAAFNLQHLKYEEKDKTKQYDTDAMKKDYERFCQLEQEEIQRYKNKEKKDDSSTIGAGEL

SEQ ID NO: 2908 - protein, 535 aa, Unknown
  Description of Unknown: uncultivated organism sequence
  Category: MG91 effectors
  Description: MG91-99 effector
MAQETFVLELPLKVEKWQADILDKRYEYLRQIYNYVQKKLIRQYKYFEQMNEFRQCTTYRDKREFFRNHPFYYNEVVGRNGEPFAIKFPYSMSESNGAKLDGFNGYISKLGKLPVGANKTYADLGINSFMLERLASNMWSAWNKFLYDRDAKRVAFKKYGELNTFGSRKKNNISFIGMAIHLDTMELVIKTNGRNGQFAEYITLPIGTGKPLTEYEMYALKSGFDSIKILNVVRKQIRGNNKYYLQMTIEGEKPQKGRTLGEGCVGIDLGPSTIAVSSLQKVSIDKLANKCDDIQRDLNRVSRKMERTRRANNPHYINEDGTIKPISRKSGERRVWHDSKRYKKLREERKELLRKQAAIRKAQHIETANALLPLGDTFIVENNPVSSWTRKSKETKINKKGKIQSKKRFGKSVANHAPSMFATILQNKVESLGGQFRKVEVKNAASRFDFTNGEFTEHGLGERVIALSNGDKHQRDLLAAFNLQHLNADGNSTKDYDVATMQKDYPTFCRLEREEMDLYLQGKKKNERTTIGAFK

SEQ ID NO: 2909 - protein, 528 aa, Unknown
  Description of Unknown: uncultivated organism sequence
  Category: MG91 effectors
  Description: MG91-100 effector
MKEVFVLELPLRVEKYQADILNKRYELLRQLYNYVQGKLLRQYRYFEQMKDYQICKTFKDKREFIKAHSFHINGVLGRNKELLDISFDEYGIMGLVTKLGQKLIGSGKTYTDMGISSTILANLSDNIWSSWNKKLYDYHADRITFKKYGSLNTFGSGKIVQKKDNEVKEYFPGMVLHLERMEIEIKTNGGLGKKATFITLPILHNPKHADYEMMALAGGSSSIKVLTIVRRLVRGQYKYYLQMSIEGEKPQKGRMLGKGNVGIDLGPTTVAVSGENIACIDKLASKCDNIQAEITKLARKIDRSRRANNPQNYNEDGTIKRGIKLVWYDSKRYKELRRELAELRRKQAAIRKQQHIDRANALLKEGDTFIVENNQISGWTTRAKETKVNEKTGKIQKKKRFGKSVANHAPSMFVTILENKVKSLGGQVVKVDTQNAASQYDFTNDSFTKHELKERNVTLANGDTHQRDMLAAFNLQHLKYDAKEKKQYDKEAMKAHYEHFCELEQEEIQRYKNKEKKDDRSTIGAEKL

SEQ ID NO: 2910 - protein, 509 aa, Unknown
  Description of Unknown: uncultivated organism sequence
  Category: MG91 effectors
  Description: MG91-101 effector
MRKKTTDENFIMELPLTVDKFQSDELYKRFELMRRIYNSAQNKLKRQYEYLSSFKAYKECKTKKEKGDFLKAHPFSFRGVLDKDGEPLKITFSEYDLKSYLSKFAKQKVDSQYTYSDFGINTSMLMHMAMAIWSAWKKVLYDPKAQEVSFKKHGELQSIGVDWEPKHPAGLILDLQKGELKVNLNNRQGQYARYITMKIKFGHKEHQIWYEGDALNAGEDSIRGLTIVRRKIRGKYNYFLQMTIRNNKPQKGRTLGTGRVAIDLGTCKIAVVTKNSVRLIPLAPSISSYSDELRIIQRQMDRSRRANNPQKYHEDGTIKKGNHDKWISSKEYIRLRDIKAELERKQAAVRKQDHIALANYLLSLGNEFVIEDNDVQEWAKRKKEEKKREKDGKNLSKAGLGKQIGNHAPAMFVTILKNKVESLGGSFIKVDTDNGATDYDFTNDEFTHHELEERYITLSDGKRHQRDTLAAFNLYHINTVQNRVYDRLAMQRHYAWFCEKEAESVEQYK

SEQ ID NO: 2911 - protein, 525 aa, Unknown
  Description of Unknown: uncultivated organism sequence
  Category: MG91 effectors
  Description: MG91-102 effector
MNEVFVLELPLMVEKYQADILNKRYEQLRQLYNYVQGKLLRQYRYFEQMADYQVCKTIREKRDFLKNHPFNINGVLDRRGKLLDITFDEYGIQGFVEKMIHKSVGNNISYADLGLNTLILDYLAASIWRAWDKKLYDLNAKRISFKKHGELDSFSSRRKVVNGTARFFGLELYLDKMELAVKVNGKQGKNAKFITLKIQHNPKHVDYEMWALKGGVDSVKVVKVVRRLVRSQYKYYVQLTIEGEKPQKGRTLGKGNVGIDLGPTTVAVSGKNVVSIDKLASKCDNIQEEITRLSRKIDRSRRANNLQNFNEDGTIKRGIKLVWNDSKRYKELRRELAELRRKQAAIRKQQHIDRANALLKEGDTFIVENNPVKAWAARAKETKVNEKTGKIQSKKRGGKSIGNHAPAMFVDILENKVKSLGGTFIRANTNNAASQYDFSNNSFKEGEDRHGLNERAITLSNGNTHQRDMLAAFNLQHLTDEKKQYDVEAMKRDYERFCQLEQEEIQRYKNKEKKDDRSTIGAEKL

SEQ ID NO: 2912 - protein, 524 aa, Unknown
  Description of Unknown: uncultivated organism sequence
  Category: MG91 effectors
  Description: MG91-103 effector
MNEVFVLELPLLVERYQADILNKRYEQLRQLYNYVQGKLLRQYRYFEQMKEYKACEKIKEKRDFFRAHPFHINGVLNGNKEQLDITFDKNGINGFVEKLAQKSAGPNITYADLGFTTYILDHLSASIWAAWEKKLYDFKAKRISFKKYGELDSFSSRRKVVGGKVYFSGMELHLDTMKLSIKMNGKQGDNAKFITLKMLHNPKHTDYEMWALKGGVDSVKVVKVVRRLVRSQYKYYVQLTIEGEKPQKGRKLGKGNVGIDLGPTTVAVSGENVVSIDKLASKCDNIQEEITRLSRKIDRSRRANNPQNFNEDGTIKHGIKLVWNDSKRYKELRRELAELRRKQAAIRKLQHIERANTLLKEGDTFIVENNQISGWATRAKETKVNEKTGKIQKKKRFGKSVANHAPSMFINILENKVKSLGGEVVKVDTKNAASQYDFTDGSFTKHELKERNVTLSNGDTHQRDMLAAFNLQHLKYDEAEAKQYDTEAMAADYERFCQLEQEEIQRYKNKEKKDDRGTIGAEKL

SEQ ID NO: 2913 - protein, 484 aa, Unknown
  Description of Unknown: uncultivated organism sequence
  Category: MG91 effectors
  Description: MG91-104 effector
MAHKENQKAFVVTFPLHTEKWQEDRIDKMMRMLTTFYNDRQRKLVRRYIYLSHSKAYKEAKGKGVVAFKNYMKENGFSQYGLDAFFKADTKGALYQCGLNSMFLQYLSQCAWSAWDKKLFGKGDFVKTDKVVNIFCSRNKKERFCGFDYDLSTFTISIKSTCTKNIICTIPFVVNKKSDYELYALSQKICRIGIVRKLIRSKYKYYVQFTFDGVPYNKGRNIGTGIVGIDPGPSKIAIVGDNKVEIAKLAPNIEEDERKTARLKRKLDRSRRATNPHMYKEDGTNIKGQRQICFSKSYNETRKQLADAQRKLAAKRKIAHNELANTLLEYGDTFKVEANSYKSMQARAKSTSMTKSGRIRSKKRYGKSIKNRAPSEFLVILKNKLLYYPKGKYYDVPSSYACTQFDFTNESFTEHKISERRIVTSDGIQRNRDTLAAFNIKNAIVNDTSTKKKKVTKSKEFFDIVKMKASYNEFCVMERYLLSV

SEQ ID NO: 2914 - protein, 524 aa, Unknown
  Description of Unknown: uncultivated organism sequence
  Category: MG91 effectors
  Description: MG91-105 effector
MEEVFVLELPLQVEKYQADILNKRYEQLRQLYNYVQGKLLRQYRYFEQMAEFQACKTIREKRDFFRSHPFHINGKLAGNKELPEITFDEYGINGFVEKMAQKSVGTNMTYADLGFTTYILDHLSASIWTAWEKKLYDYRATRISFKKYGELDSFSSRRKVVRGKAYFSGVELHLDSMELAIKLNGKVGKNAKFITLPILHNPKHADYEMWALKGGLDSVKVVKVVRRLVRGQYKYYVQLSIEGEKPQKGRTLGKGNVGIDIGPTTVAVSGENIASIDKLASKCDNIQEEITRLARKIDRSRRANNPENFNEDGTIKRGVRLVWNDSKRYKALRKEMAELQRRQAAIRKQQHIDRANALLKEGDTFIVENNQISGWTRKAKETKVNEKTGKIQKKKRFGKSVANHAPAMFVTILENKVKSLGGKVIKVDTQNAASQYDFTNNSFEKHELKERSVTLSNGDTHQRDMLAAFNLQHLKYDKAEKKQYDTEAMAQHYERFCELEQEEIMRYKKKEKKSDRSTIGAEEL

SEQ ID NO: 2915 - protein, 526 aa, Unknown
  Description of Unknown: uncultivated organism sequence
  Category: MG91 effectors
  Description: MG91-106 effector
MKEVFVLEMPLLVEKYQEDILNKRFEQLRQLYNYVQGKLLRQYKYFEQMAEFQICKTSKAKREFIKTHPFHINGVIGRNKDLLDISFDEYGILGLVTKLGQKPLGSGKSYADMGISSTILANLSNNIWSAWNKKLYDYHAKRISFKRYGELNSFGSGKIVQKKDNDVKEYFPGFILHLERMELDIKTSKSGKNETCITLPILHNPKHADYEMWALKDGSTSIKVLTIVRRLVRGRYKYYLQMSIEGEKPQKGRTLGKGNVGIDIGPTTVAVSGENIASIDKLASKCDNIQEEITRLARKIDRSRRANNPQNFNEDGTIKRGVRLVWNDSKRYKALRKEMAELQRKQAAIRKQQHIDRANALLKEGDTFVVENNPIKGWQARAKETKIDEKTGRFKSKKGRGKSIGNHAPAMFVTILENKVKSLGGEVVKVDTHNAASQYDFTNESFTDHGYDRKITLSNGDTHQRDMLAAFNLQHLKYDETEKKQYDTEAMVQHYDRFCELEQEEILRYKNKEKKDDRSTIGAGDL

SEQ ID NO: 2916 - protein, 483 aa, Unknown
  Description of Unknown: uncultivated organism sequence
  Category: MG91 effectors
  Description: MG91-107 effector
MAHKENQKAFVVTFPLRTERWQEDRIDKMMKMLTTYYNDRQKKLVGRYIYLSHSKAFKEAKGKGVVAFKKYMQENGFSKYDLDAFFKANTKGAIYQIGLNSNNIQYLSQCAWSAWERKLFGNGKFIKTDIDVNIFKSRRKNDSFAGFAYDIGSFTITIKSTYARNNICTIPFIVNRKSEYELFAMSQEIRNIAIVRKVIRGVNKYYVQFTVEGAPYNKGRHLGTGTVGIDPGPSKMAIVADKVVEINKLAPNIEEDEKVTARLKRKLDRSRRATNPHMYNEDGTSKKGQRQTIFSKSYDKTRKQLAEAQRKLTAKRKIAHNELANKILEYGDTFKVETNSFKSMQARSKTTSTTKNGRIRSKKRYGKSIKNRAPSEFLLILKNKLLQYSSGKYYDVPASYACTQFDFTDESFTEHKVSERSIITSDGIQHNRDTLAAFNIKNAIVSDTTSKKRKIVKSKEFFDINVMKETYRAFCEMESKLLA

SEQ ID NO: 2917 - protein, 528 aa, Unknown
  Description of Unknown: uncultivated organism sequence
  Category: MG91 effectors
  Description: MG91-108 effector
MNEVFVLELPLLVEKYQADILNKRYEQLRQLYNYVQGKLLRQYKYFEQMKEYQACEKIKEKRDFFRTHPFQINETLKGNKIPFKVSFDEYSIKGYIEKLAQKQIGSNMTYADLGFTTNIFDHLGASVWAAWDKKLYDFKAKRISFKKYGDLDSFSSRRKIVRGVVYFSGMELHLDTMELAIKMNGKVGKEAKFITLRMLHNPKHADYEMWALKGGVESVKVVKVVRRMVRSQYKYYVQLTIEGEKPQKGRTLGKGNVGIDLGPTTVAVSGENVVSIDKLASKCDNIQEEITRLSRKIDRSRRANNPQNFNEDGTIKRGIKLVWNDSKRYIELCRELAELRRKQAAIRKQQHIDRANALLKEGDTFIVENNPVNAWVRRAKETKVDEKTGKYKSKRGSGRSVGNHAPAMFVDILENKVKSLGGRFERVNTQNAASQYDFTIDSFKTGDDKHKLNERAITLSNGDTHQRDMLAAFNLQHLKYDEAEAKQYDTEAMAADYERFCQLEQEEIQRYKNKEKKDDRSTIGAEKL

SEQ ID NO: 2918 - protein, 524 aa, Unknown
  Description of Unknown: uncultivated organism sequence
  Category: MG91 effectors
  Description: MG91-109 effector
MMKEVFVLELPLLVEKYQADILNKRYEQLRQLYNYVQGKLLRQYRYFEQMVEFQACKTIREKRDFFRSHPFHVNGRLAGDKELPEITFDEYGIKGFVEKLAQKSVGPNMTYADLGFTTYILDHLGANIWSAWDKKLYDYRAKRISFKKFGELDSFSSRRKVVGGKVYFSGMELRLDTMELAIKLNAKQGKNAKFVTLRILHNPKHADYEMWALNGGLDSIKVVKVVRRLVRGQYKYYVQLSIEGEKPQKGRTLGKGNVGIDIGPTTVAVSGENIASIDKLASKCDNIQEEITRLARKIDRSRRANNPENFNEDGTVKRGVRLVWKDSKRYKELRKEMAELQRRQAAIRKQQHIDRANALLKEGDTFIVENNPIKGWAARKKETKIDEKTGKYKSKKGRGKSIKNHAPAMFVTILENKVKSLGGKVERVDTQNAASRFDFTDGSFTDHGYDRKVTLSNGDTHQRDMLAAFNLQHLKYDEAEKKQYDTKAMAQHYDRFCELEQEEIQRYKNKEKKDDRSTIGAGEL

SEQ ID NO: 2919 - protein, 383 aa, Unknown
  Description of Unknown: uncultivated organism sequence
  Category: MG91 effectors
  Description: MG91-110 effector
MFLQYLSQCAWSAWDKKLFGKGDFVKTDKVVNIFCSRNKKERFCGFDYDLSTFTISIKSTCTKKIICTIPFVVNKKSDYELFALSQRICRIGIVRKLIRGKYKYYVQFTFDGVPYHKGRNIGTGIVGIDPGPSKIAIVGDNKVEIAKLAPNIEEDERKTARLKRKLDRSRRATNPHMYKEDGTIIKGQRQTCFSKVYNETRKQLADAQRKLAAKRKIAHNELANTLLEYGDTFKVEANSYKSMQARTKATSMTKSGRIRSKKRYGKSIKNRAPSEFLVILKNKLLHYPNGKYYAVPASYACTQFDFTNESFTEHKISERKIVTSDGVQHNRDTLAAFNIKNAIVNETSTKKKKITKSNEFFDIVRMKASYNEFCLMERYLLSI

SEQ ID NO: 2920 - protein, 533 aa, Unknown
  Description of Unknown: uncultivated organism sequence
  Category: MG91 effectors
  Description: MG91-111 effector
MKAIEIMKEVFVLELPLQVEKYQADILNKRYEQLRQLYNYVQGKLLRQYRYFEQMLEFQACKTIREKRDFFRSYPFHINGIVGRNKELLDLSFSEYGILGLVTKLGQKPVGSGKTYADVGISSTILANLSNNIWSAWNKKLYDLHAKKISFKKYGELNTFGSGKIVQKKENEVKEFFPGMVLHLERMEIDIKTSKSGKNETYITLPILPNPKHADYEMWALKGGSSSIKVLTIVRRRVRGLYKYYLQMSIEGEKPQKGRTLGKGNVGIDIGPTTVAVSGENIASIDKLASKCDNIQEEITRLARKIDRSRRANNPENFNEDGTIKRGVRLVWKDSKRYKALRKEMAELQRRQAAIRKQQHIDRANALLKEGDTFIVENNQISGWTRKARETKVNEKTGKIQKKKRFGKSVANHAPAMFVTILENKVKSLGGEVVKVDTQNAASQYDFTNNSFEKHELKERSVTLSNGDTHQRDMLAAFNLQHLKYDEAEKKQYDREAMTQHYERFCELEQAEIQRYKNKEKKDDRSTIGAGDL

SEQ ID NO: 2921 - protein, 605 aa, Unknown
  Description of Unknown: uncultivated organism sequence
  Category: MG91 effectors
  Description: MG91-112 effector
MIEEFVLTLPLKVETWQADILNNRYEHLRCIYNMVQRKLLRHYIYLSQQNEYRQCKDNDEKRTFWENHPITFKDFCDKNGNPAIVKFPYTYSHRSKDSGKKASNGISDFVPKFKNRNIGGGLTYGSLGINASILENLGLRIEQAWKKRLYDPKSKHISFKEEGDLNTFGCREKDGFSGFVLDLQKMTLSFNTNGRQGKSAKFIHFPINAGKELTEYEMYALKGGIGSIRKIVVSREYVRGRYKYYVQLTIKEEKPQKNRTLGKGTVGLDVGPSTVAVSSLHGVSLDKLADKCDNIEHDLWRINRKMDRSKRDTNPDFFNEDKTYKKPEKGERRKWTFSNRYKRLKLERRELYRKQAAIRKQQHIEMVNALLSQGDEFIVENNPIDSWAKRAKETKRGKNGKIRCKRRFGKSVAHHAPAMFVSILQNKVRSLGGTFHKVEIKNAATQFDFTNGEFTKHELNERTVTLSNGRTHQRDMLSAFNLQHLRPDSEETKDYNIEQMEADYPVFCKLEEKGIAQFKEKRQQERDVAYFTGVSHKTLKFSSANRHNGGVGRKNCNHHAGSKRNVAETGNKSSSKENCESMETVSLVPNEYHHSNHQHLRLDGL

SEQ ID NO: 2922 - protein, 528 aa, Unknown
  Description of Unknown: uncultivated organism sequence
  Category: MG91 effectors
  Description: MG91-113 effector
MNEVFVLELPLQVEKYQADILNKRYEQLRQLYNYVQGKLLRQYRYFEQMKEYQACEKFREKKDFFKSHPFHINETLKGNKTPIKVSFDEYSIKGYIEKLAQKPVGPNMTYADIGFTTYILDHLGASIWSAWDKKLYDFKAKRISFKKYGELDSFSSRRKVGRGVIYFSGMELHLDTMELAIKMNGKVGKGAKFITLKILHNPKHADYEMWALKGGLESIKVVKVVRRLVRSQYKYYVQLTIEGEKPQKGRTLGKGHVGIDLGPTTVAISSENVVSIDKLASKCDNIQNEITKLGRKINRSRRASNPQNFNEDGTIKRGIKLVWNDSKRYKELRRELAELHRKQAAIRKLQHIERANALLKEGDTFIVENNPVNAWSRRSNETKVDEKTGKFKSKRGSGRSIGNHAPSMFVDILENKVKSLGGRFERVNTQNAASQYDFTTDSFKTGDEKHKLNERAITLSNGDTHQRDMLAAFNLQHLKLDEEKPKQYDTEAMAADYNRFCQLEHEEIMRYKNKEKKDDNSTIAAGKL

SEQ ID NO: 2923 - protein, 525 aa, Unknown
  Description of Unknown: uncultivated organism sequence
  Category: MG91 effectors
  Description: MG91-114 effector
MKEVFVLELPLQVEKYQEDILNKRYEQLRLLYNYVQRKLLRQYRYFEQMDDFQACKTFKEKRDFFKSHPFHINGIIGSNKELLDITFDDYGINGFVTKLGSKSISDENTYSDMGINSAILAKLSDNIWSSWDKMLYDHKAKRISFKRYGDLNSFGCGKKTNGSGKKVFSGLELHLETMTLAIKLNSKVGKSAKFITLPILHNPKHADYEMMALKGGIDSVKVVKVVRRMVRGRYKYYLQMTIEGEKPKKGRLLGKGNVGIDLGPTTVAVSGESIASIDKLASKCDNIQEEITRLARKIDRSRRANNPENYNEDGTIKCGVHLAWNNSKRYKALRREMAELRRKQAAIRKHQHIDRANALLKEGDTFIVENNQISGWTRKAKETKVNEKTGRIQKKKRFGKSVANHAPAMFVTILENKVKSLGGEVVKVDTQNAASQYDFTNDSFEKHELKERNVTLSNGDTHQRDMLAAFNLQHLKYDEAEKKQYDREAMAQHYERFCELEQEEIMRYKNKVKKDDRSTIGTGNL

SEQ ID NO: 2924 - protein, 528 aa, Unknown
  Description of Unknown: uncultivated organism sequence
  Category: MG91 effectors
  Description: MG91-115 effector
MNEVFVLELPLQVEKYQADILNKRYEQLRQLYNYVQGKLLRQYRYFEQMKEYQACKTIKEKRDFFKSHPFQVNESLGGDKSAFEISFNEFSIKGFIEKLVQKSVGANMTYADLGFTTNILDHLGASVWAAWDKKLYDFKAKRISFKKYGELDSFSSRRKVVGGKVYFSGMELHLDTMELAIKMNCKQGNNAKFITLKMQHNPKHAEYEMWALKGGVDSVKVVKVVRRLVRSQYKYYVQLTIEGEKPQKGRTLGMGNVGIDLGPTTVAVSGENVVSIDKLASKCDNIQEEITRLSRKIDRSRRANNPQNFNEDGTIKRGIKLVWNDSKRYKELRRELAELRRKQAAIRKQQHIDRANALLKEGDTFIVENNQISSWTTRAKETKVNEKTGKIQKKKRFGKSVANHAPSMFVSILENKVKSLGGEVVKVDTKNAASQYDFTDGSFTKHELKERNVTLSNGDTHQRDMLAAFNLQHLKYDEKDTKQYDTEAMTADYERFCQLEQEEIQRYKNKEKKDDKGTIGAEKYESKV

SEQ ID NO: 2925 - protein, 525 aa, Unknown
  Description of Unknown: uncultivated organism sequence
  Category: MG91 effectors
  Description: MG91-116 effector
MENEIFVLEMPLKVEKWQADILNKRYEYLRQIYNYVQGKLLRQFRYFEQMEEYQQCKTFKDKRTFISNHPFHIKGINDKSGNPQPITFTKLSISCFAEKLAKRQIGKDKTYLDVGINTNIIKEQTFNLWKSWEKYLYDYSAHRVAFKKKDELNIFRYGKKGDGFNGMAVNLEKMEVTIKTNGRQGNNATFLTLSVDCGKGMTEYELFALKGDIASINTVAIIRRNIRGQFKYYVQFNIEGEKPQKGRTLGVGKVGIDIGPSTIAVASLNNVSIDKLADRCDDIQHDLNIVSRKIDRSRRANNPQNFNADGTIKRISRQKGERRVWNDSNRYKKLKAERAELLRKQAAIRKNQHILKANELLEMGDTFIVENNPVDGWTRRTKETKFDKRGKIQSKKRYGKSVANHAPSMFVTILENKVKSFGGTFVRADVKNAASQFDFTSGEFTKHEVGERTVTLANGDKHQRDMMAAFNLQHLNIESEELKDYDIEQMKSDYPNFCSQEREELNRYIRKEKKDERTTIGAFRK

SEQ ID NO: 2926 - protein, 606 aa, Unknown
  Description of Unknown: uncultivated organism sequence
  Category: MG91 effectors
  Description: MG91-117 effector
MAKETFVLTLPLKVEKWQADILDKRYELLRQIYNMVQQKLLRQYIYFSQQKAFKACKGDFQKMREFFASHPFHFKGIKGRNGEPSDIKFPYTYESRSSSSGRRAPNGISDFVSKLGAHKIGKDKTLSDFGINSCILEELGLHVMQAWEKRIYESKSSRVSFKKYGDINSFGSRCKNGSFAGFTFNLEKSHITFNTNGRQRKCAKLITLPIDFSREKKGYAASALKGGIDSLRKLIIVRKCIRGKNKYYLQLTIGGEKPQKGRTLGHGNVGIDVGPSTIAVSSLQCVHFNKLADKCDNIEHDLFLVNRKLDRSRRANNPQNYNADGTVKRGVRLVWKKDKDVKRYASLKLHRKELYRKQAEIRKQQHLQMANAILSEGDTFIVENNPIDAWVRRAKETTKTKTGKNRCKKRYGKSVANHAPAMFVSILKNKVQSLGGVFHEVDVRYAATQFDFTNGTKTKHEVSERSITLSNGHTHQRDMLSAFNLQHIKLECIGTEDKDYDIKQMQADYPIFCKLEAAEQERFKVARHNERDALYFVGASEKQLRHQPQDESVANRHNGGVGRKHCNTRLGSENAEITGSGLIRESIERVPQVSDEYHISGHPPIV

SEQ ID NO: 2927 - protein, 609 aa, Unknown
  Description of Unknown: uncultivated organism sequence
  Category: MG91 effectors
  Description: MG91-118 effector
MAKETFVLSLPLIVEKWQADILDKRYELLRQTYNMVQQKLLRQYIYFAQQKTFKACENFQQKRDFFASHPFHFKGIKGRNGELSDIKFPYTYESRSSSSGKRPSGGISDYVSKLWAHRISQDKTLADFGINGSILEELGLHIMKAWETRLYEPKASRVSFKDYGTVNSFGCRYHKGNFAGFTINLEEGYITYNTNGRRGSLANIIKLPIDYSREKKGYASEALKGGVDSLRKLVIVRKIIRGRNKYYLQLTISGEKPQKGRILGHGNVGIDIGPSTIATSSLQGVHFDKLADKCDNIEHELYLVNRKLDRSRRANNPQNYNEDGTIKRGIRLVWKKDKDAKRYASLKLLRKELYRRQAEIRKLQHLEMANAMLSQGDTFIVENNPIDAWVRRTKETAKTKTGRNRCKKRYGKSVANHAPAMFVSILKNKVLSLGGQFHEVDVRYAATQFDFTNGVKTKHEVGERSITLSNGRTHQRDMLSAFNLQHITLESIGTEDKDYNIEQMYADYPIFCKLESAEQERFKVARKNERDALYFVGVSEKNLRHQHHKETVVNRHNGDVGRKHCNNSLEKENAKITGNGLIRESIERVSEVPDKYHLVGNHPIVLDGL

SEQ ID NO: 2928 - protein, 550 aa, Unknown
  Description of Unknown: uncultivated organism sequence
  Category: MG91 effectors
  Description: MG91-119 effector
MTRTRTTLDNSYVALITPKDEGYLKKMNEVFVLELPLQVEKYQADILNKRYEQLRQLHNYVQDKLLRQYRYFEQMKEYQACEKIKEKREFFRAHPFQINETLKGNKTSFKVSFDEYRIKGYIEKLAQKQVGLNTTYADLGFTTYILDHLGASVWAAWDKKLYDFKAKRISFKKFGELDSFSSRRKVVGGKVYFSGMELHLDTMELAIKMNGKVGKEAKFITLKMLHNPKHADYEMWALKDGVDSVKVVKVVRRLVRSQYKYYVQLTIEGEKPQKGRTLGKGHVGIDLGPTTVAVSGENIVSIDKLASKCDNIQEEITRLSRKIDRSRRANNPQNFNEDGTIKRGIKLVWNDSKRYKELRRELAELRRKQAAIRKQQHIERANALLKEGDTFIVENNQISGWTTRAKETKVNEKTGKIQKKKRFGKSVANHAPSMFVSILENKVKSLGGEVVKVDTKNAASQYDFTDGSFTKHELKERNVTLSNGDTHQRDMLAAFNLQHLKYNEAEAKQYDTEAMAADYERFCQLEQEEIQRYKNKEKKDDKGTIGAEKF

SEQ ID NO: 2929 - protein, 524 aa, Unknown
  Description of Unknown: uncultivated organism sequence
  Category: MG91 effectors
  Description: MG91-120 effector
MNEVFVLELPLQVEKYQADILNKRYEQLRQLYNYVQGKLLRQYRYFEQMKEYQACKTIREKRDFFRSHPFLINETLKGNKTPFTVSFDEYSIKGFVEKLAQKPVGPNMTYADLGFTTPILDHLGASIWAAWDKKLYDFKAKRISFKKYGELDSFSSRRKVVRGVVYFSGMELHLDTMELAIKMNGKVGKEAKFISLKMLHNPKHADYEMWALKGGVDSVKVVKVVRRLLRNQYKYYVQLTIEGEKPQKGRTLGKGNVGIDLGPTTVAVSGKNVVSIDKLASKVDNFQEEITRLSRKIDRSRRANNPQNFNEDGTIKRGIKLVWNDSKRYKELRRELAGLRRKQAAIRKQQHIERANALLKEGDTFIVENNQISGWTTRAKETKVNEKTGKIQKKKRFGKSVANHAPSMFVSILENKVKSLGGDLVKVDTKNAASQYVFTDNSFSKHELKERNVTLSNGDTHQRDMLAAFNLQHLKYDEKDTKQYDTAAMTADYERFCQLEQEEIQRYKNKEKKDDRSTIGAEDL

SEQ ID NO: 2930 - protein, 529 aa, Unknown
  Description of Unknown: uncultivated organism sequence
  Category: MG91 effectors
  Description: MG91-121 effector
MNEVFVLELPLQVEKYQADILNKRYEQLRQLYNYVQGKLLRQYKYFEQMKEFQACKTFKEKKDFFRSHPFHIDGILGSNKELYDITFDEYGINGFVGKLGKKQVSAGVTYADLGITSTLLDRLSLAVWAAWDKMLYDYHSRRVSFKKNGELNIFGSRKKTNGSGKKMFSGMELHLEKMEVAIKLNGKVGKAAKFITLPILHNPKHIDYEMWALKGGFDSVTVLTIVRRMVRSQYKYYVQLTVEGEKPQKGRTLGKGNVGIDLGPTTVAVSGEHIVSIDKLASKCDNIQEEITRLSRKIDRSRRANNPQNFNEDGTIKRGIKLIWNHSKRYKELRRELAELRRKQAAIRKLQHIDRANALLKEGDTFIVENNQISGWTTRAKETKVSEKTGKIQKKKRFGKSVANHAPSMFVSILENKVKSLGGEVVKVDTKNAASQYDFTNNSFKKHELKERNVTLSNGNTHQRDMLAAFNLQHLKYNEPEAKQYDTEAMAADYKRFCQLEQEEIQRYKNKEKKDDRSTIGAEELNIKE

SEQ ID NO: 2931 - protein, 528 aa, Unknown
  Description of Unknown: uncultivated organism sequence
  Category: MG91 effectors
  Description: MG91-122 effector
MNEVFVLELPLQVEKYQADILNKRYEQLRQLYNYVQGKLLRQYKYFEQMKEYQSCRTFKEKKDFFRNHPFQIKGVLGRNKELLDIFFDEYGIFGLVTKLGQKPMGSGMSYTDMGISSTILANLSYNIWSSWNKKLYDYHADRISFKKHDGLNTFGSGKIVKKKDNEVKEYFPGMVLHLDRMEIDIKTNGGLGKKTTFITLPILYNPKHADYEMMALKGGTKSIKVLTVVRRLVRGQYKYYLQLTIEGEKPQKGRTLGKGNVGIDLGPTTVAISGKNVVSIDKLVSKCDNIQEEITRLSRKIDRSRRANNPQNYNEDGTIKRGIKLVWNDSKRYKELRRELAELRRKQAAIRKQQHIDRANALLKEGDTFIVENNQISGWATRAKETKVNEKTGKIQKKKRFGKSVANHAPSMFINILENKVKSLGGEVVKVDTKNAASQYDFTDGSFTKHELKERNVTLSNGDTHQRDMLAAFNLQHLKYDEAEAKQYDTEAMAADYERFCQLEQEEIQRYKNKEKKDDRGTIGAEKL

SEQ ID NO: 2932 - protein, 484 aa, Unknown
  Description of Unknown: uncultivated organism sequence
  Category: MG91 effectors
  Description: MG91-123 effector
MAHKENQKAFVVTFPLRTEKWQEDRIDKMMRMLTTFYNDRQRKLVRRYIYLSHSKAYKEAKGKGVVAFKNYMKENGFSQYGLDAFFKADTKGALYQCGLNSMFLQYLSQCAWSAWDKKLFGKGDFVKTDKVVNIFCSRNKKERFCGFDYDLSTFTISIKSTCTKKIICTIPFVVNKKSDYELFALSQRICRIGIVRKLIRGKYKYYVQFTFDGVPYHKGRNIGTGIVGIDPGPSKIAIVGDNKVEIAKLAPNIEEDERKTARLKRKLDRSRRATNPHMYKEDGTIIKGQRQTCFSKVYNETRKQLADAQRKLAAKRKIAHNELANTLLEYGDTFKVEANSYKSMQARAKATSMTKSGRIRSKKRYGKSIKNRAPSEFLVILKNKLLYYPKGKYYDVPSSYACTQFDFTNESFTEHKISERRIVTSDGIQHNRDTLAAFNIKNAIVNDTSTKKKKVTKSKEFFDIVRMKASYNEFCLMERYLLSV

SEQ ID NO: 2933 - protein, 524 aa, Unknown
  Description of Unknown: uncultivated organism sequence
  Category: MG91 effectors
  Description: MG91-124 effector
MKEVFVLDLPLRVEKYQSDILNKRFEQLRQLYNYVQGKLLRQYRYFEQMKEYQACKTFKEKKDFFRKHPFHINGILGSNKELLDITFDEYGIKGFVEKLVQKGVGTDMTYADLGFTTYILDHLSAGIWSAWDKMLYDYKARRISFKKYGELDSFSSRRKVVQGKVYFSGMELHLDSMMLSVKMNGKVGKAAKFITLPILHNPKHANYEMWALRGGLDSVKVVKVVRRLIRGQYKYYVQMTIEGEKPQKGRTLGKGNVGIDLGPTTVAVSSENIVSIDKLASKCDSIEAEKAKLGRKIDRSRRANNPQNFNEDGTIKRGVRLVWNDSKRYKALRGEMAELQRRQSAIRKQQHIDRANELLKEGDIFIVENNQISGWTRKTKETRVDESTGRIRKKKRFGKSVANHAPSMFVNILENKVKSLGGQLVKVDTQNAASQYDFTDGSFTKHELQERNVTLSNGDTHQRDMLAAFNLQHLKYDEAEKKQYDREAMSKHYERFCELEQAEILRYKNKEKVDDRSTIGAKEL

SEQ ID NO: 2934 - protein, 527 aa, Unknown
  Description of Unknown: uncultivated organism sequence
  Category: MG91 effectors
  Description: MG91-125 effector
MEEVFVLELPLQVEKYQADILNKRYEQLRQLYNYVQGKLLRQYKYFEQMKEYEVCKSIREKRDFFRNHPFHITGVLDKSGEPLDITFDEYGIQGFVEKIIHKSVGANTTYADLGFNTLILDYLSASIWSAWDKKLYDFKAKRISFKKYGELDSFSSRRKVVRGVVYFSGMELHLDTMELAIKMNGKVGKEAKFITLKMLHNPKHADYEMWALKGGVDSVKVVKVVRRLVRSQYKYYVQLTIEGEKPQKGRTLGKGNVGIDLGPTTVAISGKNVVSIDKLASKCDNIQEEITRLSRKIDRSRRANNPQNFNEDGTIKRGVKLVWNDSKRYKELRRELAELRRKQAAIRKQQHIDRANALLKEGDTFIVENNQISGWTTRAKETKVNEKTGKIQKKKRFGKSVANHAPSMFVSILENKVKSLGGEVVKVDTKNAASQYDFTDGSFTKHELKERNVTLSNGNTHQRDMLAAFNLQHLKYDEAEAKQYDTDAMAADYERFCQLEQEEIQRYKNKEKKDDRGTIGVEQLLKT

SEQ ID NO: 2935 - protein, 603 aa, Unknown
  Description of Unknown: uncultivated organism sequence
  Category: MG91 effectors
  Description: MG91-126 effector
MAKENFVLTLPLRVEKRHADILDKRYELLRQMYNMVQQKLVRQYIYFSQQKAYKACENFEQKREFFNTHPFHFKGIKGKNGELCDIKFPYTYESRSSSSGKRPSGGISDYVSKLWSHKVGADKKLVDFGLNGSIMEELGLHVMKAWEDRLYKFKARRVSFKDYGEINSFGCRYHKGNFAGFTINLEEGFITFNANGRRGQFAEIITLPIDFSREKKGYAEEALKGGVDSLRKLIIVRRCIRGRNKYYLQLTISGEKPKKGRTLGMGNVGIDVGPSTIAISSLQGVHFDKLADKCDNIEHKLYLINRKLDRSRRANNPDNYNPDGTIKRGVRLVWKKDKDVKRYASLKQQRKELFRKQAEIRKQQHLEMANAMLSQGDTFIVENNPIDAWVRRAKETKKTKTGKNRCKKRYGKSVANHAPAMFVSILKNKVLSLGGEFREVNPGYAATQFDFTNGVFTKHEVSERSITLSNGRTHQRDMLSAFNLQHICNELKEYNITQMQADYPIFCRLETAEQERFKEARRNERDALYFVGAFAKELRHSPQEETVANRHNGGVGRKHSNTLCTENAKITGSGLVRESIERVSEAPEECYHFDCQPIILDGL

SEQ ID NO: 2936 - protein, 528 aa, Unknown
  Description of Unknown: uncultivated organism sequence
  Category: MG91 effectors
  Description: MG91-127 effector
MKEIFVLELPLQVEKYQADILNKRYEQLRQLYNYVQGKLLRQYRYFEQMKEFQICKTIKERKDFFRSHPFHINGVLNSNKELLDITFDEYGINGFVSKLGKKQVCTDTTYADLGITSTLLDRLSLAVWAAWDKMLYDYHAKRISFKKYGELNVFGSRKKTNGSGKKVFSGMELHLEKMEVAIKLNGKVGKAAKFITLPILHNPKHAEYEMWALKDGYDSVTVLTIVRRMVRRHYKYYVQLTIEGEKPQKGRTLGKGNVGIDLGPTTVAVSGKNIVSIDKLASKCDNIQAEITRLSRKIDRSRRANNPQNFNEDGTIKRGVKLVWKKEKDLKRYSKLKRELAELRRKQAAIRKQQHIERANELLKEGDTFIVENNPVKAWVRRAKETKVDEKTGKIRSKRGSGRSVGNHAPAMFVDILENKVKSLGGRFERVETQNAASRFDFTNESFTEHDRSVRAITLSNGDTHQRDMLAAFNLQHLKLEDTKTKQYDIEAMAADYDRFCQLEREEIMRYKNKKKKDDRSTIGAEKL

SEQ ID NO: 2937 - protein, 516 aa, Unknown
  Description of Unknown: uncultivated organism sequence
  Category: MG91 effectors
  Description: MG91-128 effector
MEKKKEMFVVELPLKVEKWQSDVLNKRYELITKIYNYAQKKLLRQYIYLTQMDDYKKCKTKKDKSVFFKNHPFYFKGITSKITFSEYDVTAFFEKIIKKNVSSDKTYKDFGINTSITGYLGKHAWSAWEKKIYGTGKKISFKNKGELSTISIRKKSEYFGGLDVDIEHMILSFNINGKTKSKAKKIILPINTKNLTEYEMYALKGGYDSIKVVTIVSKMIRGKYKYYVQFTIEGEKPQKGRTLGKGNVGIDIGPSTVAISSLNGVTIDTLAEKCDNIEDKISDIERKLDRSRRATNPQNFTEDGQIKRIDRKKGEKRKWEYSKRYVKLNNKKRELLRKQAAIRKLQHNIKANEVLSLGDTFIVENNPTSAWAKRAKGVRKNKNGKIQTNKRFGKSIGNHAPAMFVTILQNKVESLKGKFVKVDIKNAASRFDFTNGDFTEHNLDERKITLSNGNTHQRDMLAAFNLQHIDLTNDDLKKYNVEEMMEDYPIFCKLEKEEIKRFTNGMKIPNKSNIGI

SEQ ID NO: 2938 - protein, 527 aa, Unknown
  Description of Unknown: uncultivated organism sequence
  Category: MG91 effectors
  Description: MG91-129 effector
MTEVFVLELPLQIEKYQADLLNKRYEQLRQLYNYVQGKLLRQYRYFEQMKEYQACKTIKEKRDFFRSHPFQINETLKGNKTLFTVSFEEYSIKGFVEKLAQKPVGSNMTYADLGFTTYILDHLGASIWAAWDKKLYDFKAKRISFKKYGELDSFSSRRKVVRGVVYFSGMELHLDTMELAIKMNGKVGKEAKFITLKILHNPKHAEYEMWALKGGVDSVKVVKVVRRLVRSQYKYYVQLTIEGEKPQKGRTLGKGNVGIDLGPTTVAVSGMNIVSIDKLASKCDNIQPKITRLSRKLDRSRRANNPDNYNEDGTIKRGVKLVWKKEKDLKRYSKLKRELAELRRKQAAIRKQQHIDRANELLKEGDTFIVENNQISGWTTRAKETKVNEKTGKIQKKKRFGKSVANHAPSMFVSILENKVKSLGGEVVKVDTKNAASQYDFTNNSFTKHELKERNVTLSNGDTHQRDMLAAFNLQHLKLDEAKTKQYDTEAMAADYVRFCQLEQKEIQRYKNKEKKDDRGTIGAEKL

SEQ ID NO: 2939 - protein, 524 aa, Unknown
  Description of Unknown: uncultivated organism sequence
  Category: MG91 effectors
  Description: MG91-130 effector
MNEVFVLELPLQVEKYQADILNKRFEQLRQLYNYAQGKLLRQYRYFEQMKEYQACKTFKDKKDFFKNHPFQIHGIQGSNKQPLDITFDEYGINGFVEKLVQKSAGPNVTYADLGFTTNILDHLSASIWRAWDKMLYDYHAKRVSFKKYGELDSFSSRRKVVSGKVYFSGMELHIDTMELSVKLNGKQGANAKFITMPIQYNPKHEDYELWALKGGLTSVKVVKVVRRLVRSQYKYYVQLTIEGEKPKKGRTLGKGNVGIDIGPTTVAVSGENIASIDKLASKCDNIQAEITRLGRKIDRSRRANNPQNFNEDGTIKRGVRLVWNDSKRYKALKREMVELQRRQAAIRKQQHIDRANALLKEGDTFIVENNQISGWTKRAKETKINEKTGKIQKKKRFGKSIANHAPSMFVTILENKVNSLGGKVVKVDTQNAASQYDFTDGSFEKHELNERSVTLSNGDTHQRDMLAAFNLQHLKYDEKEKKQYDVEAMKKHYERFCELEQDEIMRYKNKEKKDDRSTIGAEKF

SEQ ID NO: 2940 - protein, 609 aa, Unknown
  Description of Unknown: uncultivated organism sequence
  Category: MG91 effectors
  Description: MG91-131 effector
MAKENFVLTLPLKVEKCHADILDKRYELLRQTYNMVQRKLLRQYIYFAQQKEYKACENFQQRRDFFASHPFHFKGINSKNGEPADIKFPFTYESRSSNSGKRPSGGISDYVSKLWAHRVGADKTLANLGINSYILEELGLHIMKAWEKRLYDPKSSRVSFKDYGGVNSFGSRYKKGNFAGFTINLEEGFITYNANGRQGRFADLIKLPIDFSREKKDYAAYALKGGIDSLRKLIILRKNIRGRNKYYLQLTISGEKPQKGRALGQGNVGIDIGPSTIATSSLQGVHFDKLADKCDDIEHELYLINRKMARSRYENNRQNYNADKTIKRGVRLVWKKDKDVKRYASLKLKRRELYRRQAEIRKLQHLEMANAMLSQGDTFIVENNPIDAWVRRAKETTKTKTGRNRCKKRYGKSVANHAPAMFVTILKNKVESLGGKFYEVDVRYAATQFDFTNGVKTKHEVSERSITLSNGHIHQRDMLSAFNLQHIKLESIGTDDKEYNIEQMKADYPIFCQLETAEQQRFKEARHNERDAQYFVGAQEKQLRHQPQDESVANRHNGGVGRKHCNTRLEGENAKITGSGLVRESIERVSQVPDEYHPIGDQPIILDGL

SEQ ID NO: 2941 - protein, 615 aa, Unknown
  Description of Unknown: uncultivated organism sequence
  Category: MG91 effectors
  Description: MG91-132 effector
MAKENFVLTLPLRVNKCQADILDKRYELLRQMYNMVQQKLVRQYIYFSQQKAYKACENFEQKREFFNAHPFHFKGIKGKNGELCDIKFPYTYESRSSSSGKRAPSGISDYVSKLGSHKIGQDKTLADFGINSYIMEELGLHIMKAWEDRLYKFKSKRVSFKDYGEINSFGSRYKNGNFAGFTINLKEGFITYNTNGRRGQYADLITLPIDFSREKRGYAAEALKGGVDSLRKLVIVRRCIRGRNKYYLQLTISGEKPQKGRTLGKGNVGIDIGPSTIATSSLYGVHFDELADKCDNIEHELYLLNRKLDRSRRANNPDNYNPDGTIKRGVRLVWKKDKDVKRYASLKQLRKELFRKQAETRKQQHLEMANAMLSQGDTFIVENNPIDAWVRRAKETTKTKTGKNRSKKRYGKSVANHAPAMFVTILENKVKSLGGQFHRIDPGYAATQFDFTNGVFTKHEVSKRSITLSNGRTHQRDMLSAFNLQHARLEAEKAKSRDKEKKVESYDIVQMQADYPIFCRLETAEQERFKDARRNERDALYFVGAFAKKLRHEPQEETVANRHNGGVGRKHCNTLCTENAKITGSGLVRESIERVSEAPEECYHAGDQSIILDGL

SEQ ID NO: 2942 - protein, 524 aa, Unknown
  Description of Unknown: uncultivated organism sequence
  Category: MG91 effectors
  Description: MG91-133 effector
MKEVFVLDLPLRVEKYQSDILNKRFEQLRQLYNYVQGKLLRQYRYFEQMKEYQACKTFKEKKDFFRNHPFHINGILGSNKELLDITFDEYGIKGFVEKLVQKGVGTDMTYADLGFTTLILDHLSAGIWSAWDKMLYDYKARRISFKKYGELDSFSSRRKVVQGKVYFSGMELHLDSMMLSVKMNGKVGKAAKFITLPILHNPKHADYEMWALKGGLDSIKVVKVVRRMVRGRYKYYLQMSIEGEKPLKGRKLGKGNVGIDLGPTTVAVSGENIASIDKLASKCDSIETEKAKLGRKIDRSRRANNPQNFNEDGTIKRGIRLEWNDSKRYKELRVEMAELQRRQAAIRKQQHIDRANELLKEGDTFIVENNQISGWTRKAKETKVNENTGKIRKKKRFGKSVANHAPAMFMTILENKVKSLGGKVVKVDTQNAASQYDFTNNSFTKHELNERSVTLSNGDTHQRDMLAAFNLQHLKYDEQEKKQYDTEAMTKHYERFCELEQAEILRYKNKEKVDDHSTIGAKEL

SEQ ID NO: 2943 - protein, 612 aa, Unknown
  Description of Unknown: uncultivated organism sequence
  Category: MG91 effectors
  Description: MG91-134 effector
MTENFVLTLPLKVEKWQADILDRRYELLRQTYNMVQRKLVRQYIYFSQQKAYKACKGDFSQLREFFASHPFHFKGITSKNGELSDIKFPYTYESRSSGSGKRAPNSISDYVSKLWTHRIGQDKTLADLGINGSILEELGLHIMSAWGKRLYDPKASRISFKDYGDVNSFGSRYHKGNFAGFTINLEEGFITYNANGRRGRYADIIKLPIDFSREKNDYAAYALKGGIESFRKLLIVRRCIRGRNKYYLQLNINGEKPQKGRTLGKGNVGIDIGPSTIATSSLQGVHFDKLADKCDNLEHELYLINRKLDRSRRANNPHNYNEDGTIKRGVRLMWKQDKDVKRYASLKQKRRELYRRQAEIRKLQHLEMANAMLSQGDTFIVENNPIDAWVRRAKETTKTKTGRNRCKKRYGKSVANHAPAMFVTILKNKVQSLGGQFLEVDVRYAATQFDFTNGIKTKHEVSERSITLSNGNTHQRDMLSAFNLQHIRQESIGTEDKDYDIEQMQADYPIFCKLETAEQERFKVARHKERDALYFLGASKKQLRRQPQDESVANRHNGGVGRKHCNTRLGSNNQENAKIRGSGHVRESIERVSQVPDGYHLVGNHPIILDGL

SEQ ID NO: 2944 - protein, 525 aa, Unknown
  Description of Unknown: uncultivated organism sequence
  Category: MG91 effectors
  Description: MG91-135 effector
MNEVFVLELPLQVEKYQADLLNKRYEQLRQLYNYVQGKLLRQYRYFEQMKEFQACKTFKEKKDFFRRHPFHIDGILGSNKELYDITFDEYGINGFVGKLGKKQVSAGVTYADLGITSTLLDRLSLAVWAAWDKMLYDYHAQRVSFRKYGELNIFGSRKKTNGSGKKVFSGMELHLEKMEVAIKLNGKVGKAAKFITLPILHNPKHIDYEMWALKGGFDSVTVLTIVRRLVRSQYKYYVQLTIEGEKPQKGRKLGKGNVGIDLGPTTVAVSGVNVVSIDKLASKCDDIQEEITRLSRRIDRSRRANNPQNFNEDGTIKRGIKLVWNDSNRYKELRRELAELRRKQAAIRKQQHIERANALLKEGDTFIVENNPISSWTTRAKETKVNEKTGKIQKKKRFGKSVANHAPSMFVSILENKVKSLGGDLVKVDTKNAASQYDFTNNSFTKHELKERNVTLSNGDTHQRDMLAAFNLQHLQYDEKDDKQYDTEAMTADYERFCQLEQEEILRYKNKVKKDDRSTIGAEKL

SEQ ID NO: 2945 - protein, 527 aa, Unknown
  Description of Unknown: uncultivated organism sequence
  Category: MG91 effectors
  Description: MG91-136 effector
MPTENFVLELPLRVEKYQADILDKRYEQLRQLYNYVQGKLLRQYRYFEQMKAYQDCNSIKEKREFFSSHPFHINGIYGRNKDLLDITFSKFGIFGLVTKLGQKSVGSGYTYTDCGISSTILAHMSANIWSAWNKMLNDYHTKRISFKRHGELNSFGSGKIDNEYFPGLVLRLEKMELDIKLNGKTGKNAKFITLSILHNPKHADYEMMALKGGFDSVKVITVVRRMVRGRYKYYLQMSIEGEKPKKGRTLGKGTVGIDLGPSTIAVSGNNIASIDKLASKCDNIEKKIQKLNRKIDRSRRANNPDNYNEDGTYKRGVRLSRNESNRYKALRKEKAELQRRQAAIRKLQHIERANELLKEGDTFVVENNQFKGMAKRSKETKVDEKTGKMRSKKRSGKSIANHAPAMFVTILKNKVESLGGRFEIVNTNNAASQYDFTDGSFTKHELSERNITLSNGDTHQRDMLAAFNLEHLKYEAKDPKKYDSEAMHEHYERFCQLEREEIERYKNKEKKDDRSTISASTIVYDKK

SEQ ID NO: 2946 - protein, 528 aa, Unknown
  Description of Unknown: uncultivated organism sequence
  Category: MG91 effectors
  Description: MG91-138 effector
MEEVFVLELPLQVEKYQADILNKRYEQLRQLYNYVQGKLLRQYRYFEQMKEFQVCKTFKEKRDFFRSHPFHINGIYGNDKELLDITFDEYGINGFVGKMGKKLVNANTTYADLGITSTLLDRLSLAVWAAWDKMLYDYRARRVSFKKHGELNIFGSRKKTNGSGKKMFSGMELHLEKMEVSIKLNGKVGKKAKFITLPILHNPKHADYEMWALKGGFDSVKVITVVRRLVRGQYKYYLQLSIEGEKPQKGRTLGKGNVGIDIGPTTVAVSGENIASIDKLASKCDNIQKEITRLARKIDRSRRANNPQNFNEDGTIKRGVRLVWKKDKDCKRYAALKREMAELQRRQAAIRKQQHIDRANALLKEGDAFIVENNQISGWVRKAKETKVNEKTGKIQKKKRFGKSVANHAPAMFVTILENKVKSLGGEVVKVDTQNAASQYDFTNNSFEKHELKERSVTLSNGDTHQRDMLAAFNLQHLKYDDAEKKQYDTEAMAQHYDRFCELEQAEIQRYKNKEKKDDRSTIGAGDL

SEQ ID NO: 2947 - protein, 512 aa, Unknown
  Description of Unknown: uncultivated organism sequence
  Category: MG91 effectors
  Description: MG91-139 effector
MNEVFVLELPLQVEKYQADILNKRYEQLRQLYNYVQGKLLRQYRYFEQMKEYQACKTIKEKRDFFKSHPFQVNESLGGDKSAFEISFNEFSIKGFIEKLVQKSVGANMTYADLGFTTNILDHLGASVWAAWDKKLYDFKAKRISFKKYGELDSFSSRRKVVGGKVYFSGMELHLDTMELAIKMNGKQGNNAKFITLKMQHNPKHAEYEMWALKGGVDSVKVVKVVRRLVRSQYKYYVQLTIEGEKPQKGRTLGMGNVGIDLGPTTVAVSGENVVSIDKLASKCDNIQEEITRLSRKIDRSRRANNPQNFNEDGTIKRGIKLVWNDSKRYKELRRELAELRRKQAAIRKQQHIDRANALLKEGDTFIVENNQISSWTTRAKETKVNEKTGKIQKKKRFGKSVANHAPSMFVSILENKVKSLGGEVVKVDTKNAASQYDFTDGSFTKHELKERNVTLSNGDTHQRDMLAAFNLQHLKYDEKDTKQYDTEAMTADYERFCQFEQEEILLYNNKLN

SEQ ID NO: 2948 - protein, 514 aa, Unknown
  Description of Unknown: uncultivated organism sequence
  Category: MG91 effectors
  Description: MG91-140 effector
MIVEKYQADILNKRFEQLRQLYNYAQGKLLRQYRYFEQMKEFQACTTFREKKDFLRSHPFHVNGILDRSGDVLNITFDEYGIKGFLEKLIHKPVGSNMTYADLGITTYILDHLSAGIWRAWDKMLYDYHAKRVSFKKYGELDSFSSRRKTSGNKVYFAGMELHLDTMELSVKLNGKQGKDAKFVTMPILHNPKHADYEMWALKGGEDSVKVVKVVRRLVRGQYKYYVQLSIEGEKPQKGRTLGKGTVGIDLGPTTVAVSGENVVSIDKLAAKCDNIQSEITRLARKIDRSRRANNPQNFNEDGTIKRGVRLVWNDSKRYKALRREMAELQRRQAAIRKQQHIDRANELLKEGDTFIVENNQISAWTRKAKETKVNEKTGKIQKKKRFGKSIANHAPSMFVTILENKVNSLGGKVVKVDTQNAASQFDFTDGSFEKHELKERSVTLSNGDTHQRDMLAAFNLQHLKYDDAKKKQYDTDAMGQHYERFCELEREEIERYKKKEKKDDRGTIGAKGL

SEQ ID NO: 2949 - protein, 521 aa, Unknown
  Description of Unknown: uncultivated organism sequence
  Category: MG91 effectors
  Description: MG91-141 effector
MKEVFVLELPLQVEKYQADILNKRYEQLRQLYNYVQGKLLRQYKYFDQMAEFQACKTINEKRIFFRNHPFHIKGILGGDKEPLNITFDEYGINAFVEKLVQKSAGPNMTYADLGFTTYVFDHLSSGIWRAWEKMLYDYRAKRISFKKYGELNSFSSRRKVVRGKIYFSGMELNLERMELSIKLNGKVGKSSKFTTLPILHNPKHADYEMWALKGGLDSVKVLKVVRRLVRGLYKYYLQMSIEGEKPQKGRTLGKGNVGIDLGPTTIAISGQDIVCIDKLAPKCDNIQKEITRLARKIDRSRRANNPQNFNEDGTIKRGARLVWSDSKRYRELRREKAELQRKQAVIRKQQHIDRANALLEEGETFIVENNPISAWTRRAKETKVNEKTGRIQKKKRFGKSVANHAPSMFVSILENKVKSLGGQLIKADPKNAASQFDFTDGSFEKHELNERSVTLSNGDTHQRDMLAAFNLQHLKGDKQYDTEAMERHYERFCELEKKEIMRYKNKEKKDDRSTIAASDFL

SEQ ID NO: 2950 - protein, 524 aa, Unknown
  Description of Unknown: uncultivated organism sequence
  Category: MG91 effectors
  Description: MG91-142 effector
MNEVFVLELPLQVEKYQADILNKRYEQLRQLYNYVQGKLLRQYRYFEQMKEYQACKTIKEKRDFFKSHPFQVNESLGGDKSAFEISFNEFSIKGFIEKLVQKSVGANMTYADLGFTTNILDHLGASVWAAWDKKLYDFKAKRISFKKYGELDSFSSRRKVVGGKVYFSGMELHLDTMELAIKMNCKQGNNAKFITLKMQHNPKHAEYEMWALKGGVDSVKVVKVVRRLVRSQYKYYVQLTIEGEKPQKGRTLGMGNVGIDLGPTTVAVSGENVVSIDKLASKCDNIQEEITRLSRKIDRSRRANNPQNFNEDGTIKRGIKLVWNDSKRYKELRRELAELRRKQAAIRKQQHIDRANALLKEGDTFIVENNQISSWTTRAKETKVNEKTGKIQKKKRFGKSVANHAPSMFVSILENKVKSLGGEVVKVDTKNAASQYDFTDGSFTKHELKERNVTLSNGDTHQRDMLAAFNLQHLKYDEKDTKQYDTEAMTADYERFCQLEQEEIQRYKNKEKKDDKGTIGAEKL

SEQ ID NO: 2951 - protein, 603 aa, Unknown
  Description of Unknown: uncultivated organism sequence
  Category: MG91 effectors
  Description: MG91-143 effector
MAKENFVLTLPLRVEKRHADILDKRYELLRQMYNMVQQKLVRQYIYFSQQKAYKACENFEQKREFFNTHPFHFKGIKGKNGELCDIKFPYTYESRSSSSGKRPSGGISDYVSKLWSHKVGADKKLVDFGLNGSIMEELGLHVMKAWEDRLYKFKARRVSFEDYGEINSFGCRYHKGNFAGFTINLEEGFITFNANGRRGQFAEIITLPIDFSREKKGYAEEALKGGVDSLRKLIIVRRCIRGRNKYYLQLTISGEKPKKGRTLGMGNVGIDVGPSTIAISSLQGVHFDKLADKCDNIEHKLYLINRKLDRSRRANNPDNYNPDGTIKRGVRLVWKKDKDVKRYASLKQQRKELFRKQAEIRKQQHLEMANAMLSQGDTFIVENNPIDAWVRRAKETKKTKTGKNRCKKRYGKSVANHAPAMFVSILKNKVLSLGGEFREVNPGYAATQFDFTNGVFTKHEVSERSITLSNGRTHQRDMLSAFNLQHICNELKEYNITQMQADYPIFCRLETAEQERFKEARRNERDALYFVGAFAKELRHSPQEETVANRHNGGVGRKHSNTLCTENAKITGSGLVRESIERVAEAPEECYHFDCQPIILDGL

SEQ ID NO: 2952 - protein, 528 aa, Unknown
  Description of Unknown: uncultivated organism sequence
  Category: MG91 effectors
  Description: MG91-144 effector
MNEVFVLELPLQIEKYQADALNKRYEQLRQLYNYVQGKLLRQHRYFEQMKEYQACKKIKEKRFFFRSHPFQINETLKGNKIPFKVSFDEYSIKGYIEKLVQKSVGPNMTYADLGFTTNILDHLGASVWAAWDKKLYDLKAKRISFKKYGELDSFSSRRKVVRGVVYFSGMELHLDSMELAIKMNGKVGKDAKFITLKMLHNPKHADYELWALKGGVDSVKVVKVVRRLVRSQYKYYVQLTIEGEKPQKGRTLGKGNVGIDLGPTTVAVSGVNVVSIDKLASKCDNIQEEITQLSRKIDRSRRANNPQNFNEDGTIKRGIKLVWSDSKRYKELRRELAELRRKQAVIRKQQHIERANALLKEGDTFIVENNPISSWTTRAKETKVNEKTGKIQKKKRFGKSVANHAPSMFVSILENKVKSLGGRFERVSTQNAASQYDFTTDTFKTGEEKHKLNERAITLSNGDTHQRDMLAAFNLQHLKYDEKDAKQYDIEAMTADYERFSQLEQEEILRYKNKVKKDDRGTIGAEKL

SEQ ID NO: 2953 - protein, 484 aa, Unknown
  Description of Unknown: uncultivated organism sequence
  Category: MG91 effectors
  Description: MG91-145 effector
MAHKENQKAFVVTFPLRTEKWQEDRIDKMMRMLTTFYNDRQRKLVRRYIYLSHSKAYKEAKGKGVVAFKNYMKENGFSQYGLDAFFKADTKGALYQCGLNSMFLQYLSQCAWSAWDKKLFGKGDFVKTDKVINIFCSRNKKERFCGFDYDLSTFTISIKSTCTKKIICTIPFVVNKKSDYELFALSQRICRIGIVRKLIRGKYKYYVQFTFDGVPYHKGRNIGTGIVGIDPGPSKIAIVGDNKVEIAKLAPNIEEDERKTARLKRKLDRSRRATNPHMYKEDGTIIKGQRQTCFSKVYNETRKQLADAQRKLAAKRKIAHNELANTLLEYGDTFKVEANSYKSMQARTKATSMTKSGRIRSKKRYGKSIKNRAPSEFLVILKNKLLHYPNGKYYAVPASYACTQFDFTNESFTEHKISERKIVTSDGVQHNRDTLAAFNIKNAIVNETSTKKKKITKSNEFFDIVRMKASYNEFCLMERYLLSI

SEQ ID NO: 2954 - protein, 603 aa, Unknown
  Description of Unknown: uncultivated organism sequence
  Category: MG91 effectors
  Description: MG91-146 effector
MAKENFVLTLPLRVEKRHADILDKRYELLRQMYNMVQQKLVRQYIYFSQQKAYKACENFEQKREFFNTHPFHFKGIKGKNGELCDIKFPYTYESRSSSSGKRPSGGISDYVSKLWSHKVGADKKLVDFGLNGSIMEELGLHVMKAWEDRLYKFKARRVSFKDYGEINSFGCRYHKGNFAGFTINLEEGFITFNANGRRGQFAEIITLPIDFSREKKGYAEEALKGGVDSLRKLIIVRRCIRGRNKYYLQLTISSEKPKKGRTLGMGNVGIDVGPSTIAISSLQGVHFDKLADKCDNIEHKLYLINRKLDRSRRANNPDNYNPDGTIKRGVRLVWKKDKEVKRYASLKQQRKELFRKQAETRKQQHLEMANAMLSQGDTFIVENNPIDAWVRRAKETKKTKTGKNRCKKRYGKSVANHAPAMFVSILKNKVLSLGGEFREVNPGYAATQFDFTNGVFTKHEVSERSITLSNGRTHQRDMLSAFNLQHIGNELKEYNITQMQADYPIFCRLETAEQERFKEARRNERDALYFVGAFAKELRHSPQEETVANRHNGGVGRKHSNTLCTENAKITGSGLVRESIERVSEAPEECYHFDRQPIILDGL

SEQ ID NO: 2955 - protein, 528 aa, Unknown
  Description of Unknown: uncultivated organism sequence
  Category: MG91 effectors
  Description: MG91-147 effector
MKTKEEKKDFVIELPLKVEKWQEHLLSKRCEFLRDIYNYVQNNLLRQFGYFEQMSEWKNCKTKKSKGKFLESHPFTIKGFDTPITFTKYGISNFVSKLCQKKVSREKKYKDFGLNSMTLQQMGLNVWSAWNKKIYDKPRVIKNKETGEIKIKPYEIHFKKRGGLNTIFFGKSNNYFIGLEIDFEHMILYYNINGKQGKNKQSITLPIVFNKPTEYEMFAFKGGYETIKLIKIVRKLIRGRYKFYVQFTIEGEKPQKGRTLGKGVVGIDVGPSTVAVSSLNGVQINTLAEKCDDVYHKCKLLGRKMDRSRRATNPQNYNDDGTIKKGEKLEWNYSKRYLKVRNKRCELLRKQAAIRKLQHNIDTNELLRLGDTFVVEKNPISAWQQRGKKIKINKRGRIQTNKRFGKSIANHAPAMFITILENKVKSLGGEFKRVPIENGASSFDFTNSEFVKHGLSERKITLSNGNVHQRDMIAAYNLQHLNYNSEELKDYNIEDMKKDYPIFCELEKMEIDKYISGQKKSHKSTVGY

SEQ ID NO: 2956 - protein, 524 aa, Unknown
  Description of Unknown: uncultivated organism sequence
  Category: MG91 effectors
  Description: MG91-148 effector
MNEVFVLELPLQVEKYQADILNKRYEQLRQLYNYVQGKLLRQYRYFEQMKEYQACKTIKEKRDFFKSHPFQVNESLGGDKSAFEISFNEFSIKGFIEKLVQKSVGANMTYADFGFTTNILDHLGASVWAAWDKKLYDFKAKRISFKKYGELDSFSSRRKVVGGKVYFSGMELHLDTMELAIKMNGKQGNNAKFITLKMQHNPKHAEYEMWALKGGVDSVKVVKVVRRLVRSQYKYYVQLTIEGEKPQKGRTLGMGNVGIDLGPTTVAVSGENVVSIDKLASKCDNIQEEITRLSRKIDRSRRANNPQNFNEDGTIKRGIKLVWNDSKRYKELRRELAELRRKQAAIRKQQHIDRANALLKEGDTFIVENNQISGWATRAKETKVNQKTGKIQKKKRFGKSIANHAPSMFVSILENKVKSLGGEVVKVDTKNAASQYDFTNGSFTKHELKERNVTLSNGDTHQRDMFAAFNLQHLKYDETEAKQYDTKAMAADYERFCQLEQEEIQRYKNKEKKDDRSTIGAEKL

SEQ ID NO: 2957 - protein, 557 aa, Unknown
  Description of Unknown: uncultivated organism sequence
  Category: MG91 effectors
  Description: MG91-149 effector
MVTQKCRPLTGVGAESRAGFQVMVTQKCWLIEIMEEVFVLELPLQVEKYQADILNKRYEQLRQLYNYVQGKLLRQYRYFEQMTEFQACKKIKEKRDFFRSHPFQINETLKGNNTPFKVSFDEYSIKGFVEKLVQKSVGPNMTYADLGFTTYILDHLGTSVWSAWNKKLYDFKAKHISFKKHGELDSFSSRRKVVRGVVYFSGMELHLDTMELSIKLNGKVGKEAKFITMSILHNPKHAEYEMWALKGGLESVKVVKVVRRLVRGQYKYYAQLTIEGEKPQKGRTLGKGNVGIDIGPTTVAVSGENIASIDKLASKCDNIQEEITRLARKIDRSRRANNPENFNEDGTIKRGVRLVWNDSKHYKELRRELAELQRRQAAIRKQQHIDRANELLKEGDTFIVENNQISGWTRKAKETKVNEKTGKIQKKKRFGKSIANHAPAMFVTILENKVKSLGGEVVKVDTQNAASQYDFTNNSFEKHELKERSLILSNGDTHQRDMLAAFNLQHLKYDAPEKKQYDTEAMTQHYDRFCELEQAEIQRYKNKEKKDDRSTIGAGDL

SEQ ID NO: 2958 - protein, 524 aa, Unknown
  Description of Unknown: uncultivated organism sequence
  Category: MG91 effectors
  Description: MG91-150 effector
MEEVFVLELPLQVEKYQADILNKRYEQLRQLYNYVQGKLLRQYRYFEQMTEFQACKKIKEKRDFFRSHPFQINETLKGNNTPFKVSFDEYSIKGFVEKLVQKSVGPNMTYADLGFTTYILDHLGTSVWSAWNKKLYDFKAKHISFKKHGELDSFSSRRKVVRGVVYFSGMELHLDTMELSIKLNGKVGKEAKFITMSILHNPKHAEYEMWALKGGLESVKVVKVVRRLVRGQYKYYAQLTIEGEKPQKGRTLGKGNVGIDIGPTTVAVSGENIASIDKLASKCDNIQEEITRLARKIDRSRRANNPENFNEDGTIKRGVRLVWNDSKHYKELRRELAELQRRQAAIRKQQHIDRANELLKEGDTFIVENNQISGWTRKAKETKVNEKTGKIQKKKRFGKSIANHAPAMFVTILENKVKSLGGEVVKVDTQNAASQYDFTNNSFEKHELKERSVILSNGDTHQRDMLAAFNLQHLKYDAPEKKQYDTEAMTQHYDRFCELEQAEIQRYKNKEKKDDRSTIGAGDL

SEQ ID NO: 2959 - protein, 527 aa, Unknown
  Description of Unknown: uncultivated organism sequence
  Category: MG91 effectors
  Description: MG91-151 effector
MNEVFVLELPLQVEKYQADILDKRYEQLRQLYNYVQGKLFRQYRYFEQMKEYQACEKINEKKDFFRTHPFLINETLKGIKTPFMVSFDEYSIKGFIEKLAQKQVGPNMTFADLGFTTYILDHLGASVWAAWDKKLYDFKAKRISFKKYGELDSFSSRRKVVRGVVYFSGMELHLDTMELAIKMNGKVGKEAKFITLKMLHNPKHADYEMWALKGGVEIVKVVKVVRRLVRSQYKYYVQLTIEGEKPQKGRTLGKGNVGIDLGPTTVAVCGENVVSIDKLASKCDNIQEKITRLSRKIDRSRRANNPQNFNEDGTIKRGIKLVWKKDKDLKRYSKLKRELVELRRKQTAIRKQQHIDRANALLKEGDTFIVENNQISSWTMRAKETKVNEKTGRIQKKKRFGKSVANHAPSMFINILENKVKSLGGKVVKVDTKNAASQYDFTDGSFTKHELKERNVTLSNGDTHQRDMLAAFNLQHLKYNEKETKQYDTEAMAADYERFCQLEQEEIQRYKNKEKKDDRGTIGAEKL

SEQ ID NO: 2960 - protein, 528 aa, Unknown
  Description of Unknown: uncultivated organism sequence
  Category: MG91 effectors
  Description: MG91-152 effector
MNEVFVLELPLQIEKYQADALNKRYEQLRQLYNYVQGKLLRQHRYFEQMKEYQACKKIKEKRIFFRSHPFQINETLKGNKIPFKVSFDEYSIKGYIEKLVQKSVGPNMTYADLGFTTNILDHLGASVWAAWDKKLYDLKAKRISFKKYGELDSFSSRRKVVRGVVYFSGMELHLDSMELAIKMNGKVGKDAKFITLKMLHNPKHADYELWALKGGVDSVKVVKVVRRLVRSQYKYYVQLTIEGEKPQKGRTLGKGNVGIDLGPTTVAVSGVNVVSIDKLASKCDNIQEEITQLSRKIDRSRRANNPQNFNEDGTIKRGIKLVWSDSKRYKELRRELAELRRKQAVIRKQQHIERANALLKEGDTFIVENNPISSWTTRAKETKVNEKTGKIQKKKRFGKSVANHAPSMFVSILENKVKSLGGRFERVSTQNAASQYDFTTDTFKTGEEKHKLNERAITLSNGDTHQRDMLAAFNLQHLKYDEKDAKQYDTEAMTADYERFCQLEQEEILRYKNKVKKDDRGTIGAEKL

SEQ ID NO: 2961 - protein, 527 aa, Unknown
  Description of Unknown: uncultivated organism sequence
  Category: MG91 effectors
  Description: MG91-153 effector
MTEVFVLELPLQIEKYQADLLNKRYEQLRQLYNYVQGKLLRQYRYFEQMKEYQACKTIKEKRDFFRSHPFQITETLKGNKTLFTVSFEEYSIKGFVEKLAQKPVGSNMTYADLGFTTYILDHLGASIWAAWDKKLYDFKAKRISFKKYGELDSFSSRRKVVRGIVYFSGMELHLDTMELAIKMNGKVGKEAKFITLKILHNPKHAEYEMWALKGGVDSVKVVKVVRRLVRSQYKYYVQLTIEGEKPQKGRTLGKGNVGIDLGPTTVAVSGMNIVSIDKLASKCDNIQPKITRLSRKLDRSRRANNPDNYNEDGTIKRGVKLVWKKEKDLKRYSKLKRELAELRRKQAAIRKQQHIDRANALLKEGDTFIVENNQISGWTTRAKETKVNEKTGKIQKKKRFGKSVANHAPSMFVSILENKVKSLGGEVVKVDTKNAASQYDFTNNSFTKHELKERNVTLSNGDTHQRDMLAAFNLQHLKLDEAKTEQYDTAAMAADYNLFCQLEQEEIQRYKNKEKKDDRSTIGADKL

SEQ ID NO: 2962 - protein, 326 aa, Unknown
  Description of Unknown: uncultivated organism sequence
  Category: MG91 effectors
  Description: MG91-154 effector
MNEVFVLELPLMVEKYQADILNKRYEQLRQLYNYVQGKLLRQYRYFEQMADYQVCKTIREKRDFLKNHPFNINGVLDRRGKLLDITFDEYGIQGFVEKMIHKSVGNNISYADLGLNTLILDYLAASIWRAWDKKLYDLNAKRISFKKHGELDSFSSRRKVVNGTARFFGLELYLDKMELAVKVNGKQGKNAKFITLKIQHNPKHVDYEMWALKGGVDSVKVVKVVRRLVRSQYKYYVQLTIEGEKPQKGRTLGKGNVGIDLGPTTVAVSGENIVCIDKLASKCDNIQDEITRLSRKIDRSRRANNPQNFNENATIKRGIRLVWNDS

SEQ ID NO: 2963 - protein, 525 aa, Unknown
  Description of Unknown: uncultivated organism sequence
  Category: MG91 effectors
  Description: MG91-155 effector
MTEVFVLELPLQVEKYQADILNKRYEQLRQLYNYVQGKLLKQYRYFEQTKKFRACKTIKEKRDFFKKHPFHINGILGSNKELLDITFDEYGISGFVTKLGMKNIGSNISYTDVGINSSILAKLSSNIWSSWIKFLYDSKAKRIAFKKYGELNSFGCGKKTNGSRKKIFSGMELNLERMELSIKLNGKVGKSAKFIILPILHNPKHEDYEMMALKGGFDSVKVITVVRRMVRGHYKYYLQMSIEGEKPQKGRTLGKGNVGIDLGPTTVAVSGENIASIDKLAPKCDNIEAAKVKLSRKIDRSRRANNPLNFNKDGTVKRGVRLVWNDSNRYKALRCEMAELHRKQAAIRKQQHIDRANALLKEGDTFIVENNQISGWTRRAKETKVDETTGKIRKKKRFGKSVANHAPSMFVTILENKVKSLGGQVVKVDTQNAASQYDFTNDSFEKHELKERSVTLSNGDVHQRDMLAAFNLQHLKYDETEKKKYNRKAMEQHYERFCELEKEEIRRYKEKEKADDRSTIGTSNF

SEQ ID NO: 2964 - protein, 405 aa, Unknown
  Description of Unknown: uncultivated organism sequence
  Category: MG91 effectors
  Description: MG91-156 effector
MPRFKSSKRGLHSIEGKTNKTGLKFRPEKKVLNWCGHDYRVLIDPKDDYIQRALKENERSDKYRKIKYCRLVRKRIRSSDRFFLQVVLEGTAPVKHVYAPVTERAAIDPGPQSIALFSKEFAGKIQVAGSNNFNEAVSRRLLRAMDRSLRRNNPDAYNEDGTIKKGAKLVKSKNYQRKVDRLREMHREAAAERKCRHGQTINLLLSIAGDIRIEKNSWKAFQRGHFGKSLGKSAMSGFIAQLKSKAASAGLKVTEVNPYKLKLSQYDPYTDTYRKKDLSERWQEMKAGSGQYIQRDVLSALLLYCANIEKEIHIPKVAVEQLEGAKQFLTDAGYVVLKSTSGRDQRDPRLASEPKAMTPEMARQKILRGAGDSHLPTDQELGQIRAGGKVSTWSKETFPLQRGVV

SEQ ID NO: 2965 - protein, 530 aa, Unknown
  Description of Unknown: uncultivated organism sequence
  Category: MG91 effectors
  Description: MG91-157 effector
MTSQSFVIELPIAVDDAEMRTIVRKLEFARQLHNATLGTAMGQLQQMRQDAAWKEACVMPKGKERAAAFRALDRKYGLTEYDLHSVIARHREGSGRKAELGINETQKIATRVFQAINRYKLGLGGMPRFKSSKRGLHSIEGKTNKTGLKFRPEKKVLNWCGHDYRVLIDPKDDYIQRALKENERSDKYRKIKYCRLVRKRIRSSDRFFLQVVLEGTAPVKHVYAPVTERAAIDPGPQSIALFSKEFAGKIQVAGSNNFNEAVSRRLLRAMDRSLRRNNPDAYNEDGTIKKGAKLVKSKNYQRKVDRLREMHRVAAAERKCRHGQTINLLLSIAGDIRIEKNSWKAFQRGHFGKSLGKSAMSGFIAQLKSKAASAGLKVTEVNPYKLKLSQYDPYTDTYRKKDLSERWQEMKAGSGQYIQRDILSALLLYCADIEKEIHIPKVAVEQLEGAKQFLTDAGYVVLKSTSSRDQRDPRLASEPKAMTPEMARQKILRGAGDSHLPTDQALGRIRAGGKVSTWSKETFPLQRGVV

SEQ ID NO: 2966 - protein, 528 aa, Unknown
  Description of Unknown: uncultivated organism sequence
  Category: MG91 effectors
  Description: MG91-158 effector
MKEIFVLELPLKVEKYQADILDKRYEQLRQLYNYVQGKLLRQYRYFEQMKEFQACKKIKEKRDFLRNHPFHVNGIYGLNKELLDISFDEYGILGWVTKLGQRSISLGRTYSDMGITARMLANLSDNIWSAWKKKLYDYHADRISFKKHGCLNTFGCTKSVTKHGGKVKEYFSGMVLHLERMELDIKTNGRTRKTATFITLPILHNPKHADYEMMALAGGVSSIKVLTVVRRMVRGRYKYYLQMSIEGEKPQKGRTLGKGNVGIDLGPTTVAVSGENVVSIDKLASKCDNIKSEIGKLNRKIDRSRRANNPQNFNEDGTIKRGVRLVWNDSKRYKALLKEKAEMQRKQAAIRKQQHIDRANALLKEGDTFIVENNKISGWTARAKETKVNEKTGKIQKKKRFGKSVANHAPAMFVTILENKVKSLGGQVVKVDTQNAASQYDFTNDTFNKHELKERSITLSNGDTHQRDMLSAFNLQHLKYDEKELKQYDKEGMKDHYKQFCKMEKEEIERYKNKEKKDDRSTIGAEGL

SEQ ID NO: 2967 - protein, 601 aa, Unknown
  Description of Unknown: uncultivated organism sequence
  Category: MG91 effectors
  Description: MG91-159 effector
MIEEFVLTLPLKVELWQADILNKRYEHLRRIYNMVQRKLLRNYIYLSQQDAYRQCKDNNEKRDFWENHPVTIKEFCDKNGNPAIVKFPYTLSRRSKNSGKKASNGISDFVPKFKNHNIGSGLTYGALGINASILEELGLRIQQAWEKRLYNPKSKHISFKEEGDINTFGCREKRGFSGFVLDLSHMMLLVNINGRQHQLAQYLNLPINPNKELTEYEMYALKGGLSSVRKIIISREYIRGRYKYYVQLTIKGEKPQKNRTLGKGTVGIDVGPSTVAVSSLQGVSLDKLADKCDDIERDLWRINRKMDRSKRATNPDFFNKDKTYSKRKKDERRKWTFSNRYKRLKLERRELYRKQAAIRKQQHIEMANALLSQGDEFIVENNPIDSWAKRAKETKKGKNGKNRCKRRFGKSIAHHAPAMFVSILQNKVRSLGGSFREVEIKNAATQFDFTNGEFTKHELNERTVTLSNGRTHQRDMLAAFNLQHLKEEVKDYDIEQMDVDYPLFCKLEEKGIAQFKENRHLDRDVAYFVGASHKTLKFSSANRHNGGVGRKNCNHHSGGRDVAKTGNKSSIMKNCESLEPVSVLPNEYHHSNHQHLKIDGL

SEQ ID NO: 2968 - protein, 483 aa, Unknown
  Description of Unknown: uncultivated organism sequence
  Category: MG91 effectors
  Description: MG91-160 effector
MAHKENQKAFVVTFPLRTEKWQEDRIDKMMRMLTTFYNDRQRKLVRRYIYLLHSKAYKEAKGKGVVAFKNYMKEHGFSQYGLDAFFKADTKGALYQCGLNSMFLQYLSQCAWSAWDKKLFGKGDFVKTDKVVNIFCSRNMKGRFCGFDYDLSTFTISIKSTCTKKIICTIPFVVNKKSDYELFALSQKTCRIGIVRKLIRSKSKYYVQFTFDGVPYNKGRNIGTGIVGIDPGPSKIAIVGDKKVELRKLAPNIIEDERKTARLKRKFDRSRRATNPHMYKEDGTNIKGQRQICFSKAYNETMKQLAEAQRKLAAKRKIAHNKLANTLLEYGDTFKVEANSYKSMQARAKATSMTKSGRIRSKKRYGKSIKNRAPSEFLVILKNKLLRYPKGKYYDVPASYACTQFDFTNESFTQHKISERKIVTSDGIQHNRDTLAAFNIKNAIVNDISKKKKITKSKEFFDIVRMKASYNEFCLMERYLLSV

SEQ ID NO: 2969 - protein, 602 aa, Unknown
  Description of Unknown: uncultivated organism sequence
  Category: MG91 effectors
  Description: MG91-161 effector
MIEEFVLTLPLKVETWQADILNNRYEHLRHIYNMVQRKLLRRYIYLSQQNEYRQCKDNDEKRTFWENHPITFKDFCDKNGNPAIVKFPYTYSHRSKDSGKKASNGISDFVPKFKNRNIGGGLTYGSLGINASILENLGLRIEQAWKKRLYDPKSKHISFKEEGDLNTFGCREKDGFSGFVLDLQKMTLSFNTNGRQGKSAKFIHFTINAGKELTEYEMYALKGGIGSIRKIVVSREYVRGRYKYYVQLTIKGEKPQKNRTLGKGTVGIDVGPSTVAVSSLQGVSLDKLADKCDDIERDLWRINRKMDRSKRATNPNFFNKDKTYSKRKKDERRKWTFSNRYKRLKLERRELYRKQAAIRKQQHIEMANALLSQGDEFIVENNPIDSWAKRAKETKKGKNGKNRCKRRFGKSIAHHAPAMFVSILQNKVRSLGGSFREVEIKNAATQFDFTNGEFTKHELNERTVTLSNGRTHQRDMLAAFNLQHLKEEVKDYDIEQMDVDYPFFCKLEEKGIAQFKENRHLDRDIAYFVGASHKTLKFSSANRHNGGVGRKNCNHHAGSKRNVAETGNKSSSKKNCESMETVSLVPNEYHHSNHQHLRLDGL

SEQ ID NO: 2970 - protein, 537 aa, Unknown
  Description of Unknown: uncultivated organism sequence
  Category: MG91 effectors
  Description: MG91-162 effector
MSTKSFIISLPIITGDQDRRRLQKSFSFGCNLQNAVMGGGWDRVLKMRATAEWQTARAMPKSSERTKAFRDLRVRFRLSENDFHADVAKHRKASGRGHLLGINEGQKLASRAWISVERHLYNGGSPRFISSRRGLHSIEGKTNRTGIIWKADQQCVTVCKHVYRVRVDKRDDWLTRALQDPTDPTKPRKVKYCRIVREMRKGKERFLLQLVAEGTSPLKHAYAGKDLRMAIDPGLGSLTYATEDGTIAKVQIAPSADTDHRAVRKLQRAMERSRQATNPDNYETVEVVRHGKNHKSLKVKSGRLQWRFSKRYESLRAELAEIFRLSAATRKREHGEVCNWLLGHAGHIIVEDNSYKAFQRGRFGKTIGRHAPAALYAQLTNKAESAGLLVEVVSPKKLKPTQHNLLTGQFVKHELWERRVRLGEDDDERWIDRDAAACLNLLYADLEKQTYAPERICEAVLAGVTAWLDAGVVVIQAREGITEREFGRFRRRGIPSLTVQGLRQQGFRGRSDSKSGATPRRKASTVSKPSHLSGEVV

SEQ ID NO: 2971 - protein, 518 aa, Unknown
  Description of Unknown: uncultivated organism sequence
  Category: MG91 effectors
  Description: MG91-163 effector
MNNKKEDDIFVLELPLSVEKWQSDLLDRRYEYLRQIYNYAQRKLIRQYIYLVQTEEYKKCRTKKDKSSFFGNHEFWFNGIKCPITFTEFGIKKYVTKLCKLKVSSGMTYKDFGLNSSHLETLGANMWAAWDKKIYGKGERINIKRYGCLNTFSVRCKSGYFGGLKVILDGNEIYLFLDMNGKKGEKEKKEIKLTVKIGKMTEYEMQALRNGIENIRMVTIARKLVRGKYKYYVQFAIKDEKPKKGRKLGKGSVGIDVGPSTVAVSSLHGVEINTLAEKCDDIHRKVRLIQRKMDRSSRASNPQNYNEDGTIKKVRGQKLKWVRSKNYVRLRNEKRELMRKQAAIRKLSHNIDTNKLLELGDTFVVEDNPISSWTKRASGIRKGKNGKNLSNKRYGKSVANHAPAAYVEILKNKVESLGGKFIKVDTKNGASGYDFTTGEYTKHGVEKRKVTLSNGNVHQRDMLAAFNLQHLNYEDGELKSYNVEEMEKDYPIFCKLEKEEIKRYTSGQKTSHKSTVGY

SEQ ID NO: 2972 - protein, 459 aa, Unknown
  Description of Unknown: uncultivated organism sequence
  Category: MG91 effectors
  Description: MG91-164 effector
MKTAATTSFVAELPLRVGADVEALLERTFGFARNLYNATLGTVLGRYQALRESQAWQLARTLPKKEAGEEFNRLMRQADLTKSGFEKILNKHRHSSGRAEQLDCNSGQKIADRLWDAFMRYRTRQGGKPRFKSERRGIHSIEGKTNTTGFRWKAQEGCVRWGKRRLPVIVNKQDDWLMRALADPIDPSKRRRVKYCRILWRKFGGRKRWFVQLVCEGVSPIKHILAPTERKAGIDPSTKSMTVACACGAVEKVDLATPLKKADREIRLLQRKLDRSRRATNKDNYNEDKTVKKGASGWVYSKHYEKIRTVYADAQRRAAAHRKCVCNEAVNWVLGQAGCIIVEKNNFKAFQKSRYGKSISKAAPGQFVTNLNVKAVSAGLKVFIVPPYELRPSQHDIETGQYVRHELCERWVKLGQSGLWLNRNALAALNLLWLDDAATRYSAARRSERTLGSRETGWA

SEQ ID NO: 2973 - protein, 484 aa, Unknown
  Description of Unknown: uncultivated organism sequence
  Category: MG91 effectors
  Description: MG91-165 effector
MAHKENQKAFVVAFPLRSEKWQEDRIDKIMRMLTTFYNDRQRKLVRRYIYLSHSKAYKEAKGKSVVAFKNYMKENGFSQYGLDAFFKADTKGALYQCGLNSMFLQYLSQCAWSAWDKKLFGNGDFVKTTKVVNIFCSRNQKGKFCGFDYDLSTFTIRIKSTCTKKIICTIPFIVNKKSDYELFALSQKICRIGIVRKLIRSKYKYYVQFTFDGIPYNKGRNIGTGIVGIDPGPSKIAIVGDNKVEILKLAPNIEEDERKTARLKRKLDRSRRATNPHMYKEDGTTIKGQRQTCFSKAYNETRKQLADAQRKLAAKRKIAHNELANTLLEYGDTFKVEANSYKSMQARTKATSVTKSGRIRSKKRYGKSIKNRAPSEFLVILKNKLLYYPKGKYYDVPASYACTQFDFTNESFTEHKISERKIVTSDGIQHNRDTLAAFNIKNSIVNDTSTKKKKITKSKEFFDIKKMKASYNEFCIMEHHLLSV

SEQ ID NO: 2974 - protein, 530 aa, Unknown
  Description of Unknown: uncultivated organism sequence
  Category: MG91 effectors
  Description: MG91-166 effector
MKSSSIIVSYEITLPQRIYLHLDRLFSVFRRSVRNFIDMFWNENTLGLLNQKGHTCSILKEIVQRPQNLPSRVFRNALEITGQILRSQIERKRLFDAFMQYPCLVLYNEREIAKRLNTSTWFALNVKRQILKLIRNGERRDYFSLAKPSFSGSVVITSADDSLEKGQFKRLRIEKNKLIFELKVPVGNAWDWIKVEKFVPDRLRKALKNAKEIKAPLIKKVDLKSGFSIYRLVIPLEIQTKVKDKVERVFALDLSPSEKRIGVGVVVDSEGYSKPVFFNAYKMFKKLERLYREISNLEKKIDHIADDLHSTFKREHKEKLYQRLRHLYQEQKLRWRKFKDLRKQVLESFTNLVILHAKAYNCDAIAIEDLKFKDLPDWKNKRLRRIFSIWFYSKFEDRLRHKAQREGIKVLSVNPFNTSQVCHECGSKSKANRLEFACESCGKHFDRDYNASVNIGLKALTLACKTKSKPYKGKDIPARFPSLQVLTRYKFKSLLTLLSLSKLVAYLRLVETSYLKLKSLLKYVSADKYG

SEQ ID NO: 2975 - protein, 530 aa, Unknown
  Description of Unknown: uncultivated organism sequence
  Category: MG91 effectors
  Description: MG91-167 effector
MKSSSIIVSYEITLPQRIYLHLDRLFSVFRRSVRNFIDMFWNENTLGLLNQKGHTCSILKEIVQRPQNLPSRVFRNALEITGQILRSQIERKRLFDAFMQYPCLVLYNEREIAKRLNTSTWFALNVKRQILKLIRNGERRDYFSLAKPSFSGSVVITSADDSLEKGQFKRLRIEKNKLIFELKVPVGNAWDWIKVEKFVPDRLRKALKNAKEIKAPLIKKVDLKSGFSIYRLVIPLEIQTKVKDKVERVFALDLSPSEKRIGVGVVVDSEGYSKPVFFNAYKMFKKLERLYREISNLEKKIDHIADDLHSTFKREHKEKLYQRLRHLYQEQKLRWRKFKDLRKQVLESFTNLVILHAKAYNCDAIAIEDLKFKDLPDWKNKRLRRIFSIWFYSKFEDRLRHKAQREGIKVLSVNPFNTSQVCHECGSKSKANRLEFACESCGKHFDRDYNASVNIGLKALTLACKTKSKPYKGKDIPARFPSLQVLTRYKFKSLLTLLSLSKLVAYLRLVETSYLKLKSLLKYVSADKHG

SEQ ID NO: 2976 - protein, 633 aa, Unknown
  Description of Unknown: uncultivated organism sequence
  Category: MG91 effectors
  Description: MG91-168 effector
MLTKDLKQEALKRGFLHSGVNDSIEAYRTRNLTIYDFVCEESAVVRVCISKQHAGIYDVLSNIWKDCMLENYLEDPNQFANYMLSECAKKLLKTDSLFFDSKASFAIDAQIRKAKNWKKINQKENREKEIKKIMAGTNKPVPSGFKIFSEKLLCSAKRIMYSAKEKSLYCPECGNTFQLPDVPKKGSLHTCPACGYSTKVSSAQYLNDIHWSCIVQAAGKRSIIRYFCNELFIEYGKCSTILYEKYRTIVEEDGSMVPLMQTSEGWKDYKGKNYSYFYTVPKREVPNDMYLYGTVEALMKMPALKNSMLDVWVKQHIGADKKLCSEYLVENYIKVYAQTTIYEKLLKHGLNKIAHEAAFYYDSSFHKNEEKVDKFLNLTKGNLDRLREFIPDPSGSNVSAMRYLEKYNVYLKDDELKTFLRLEVSDNMKEQIVKFCKCKKVTLYKINKYVTENANADWSSYFDYIGWTEELDYKKSDSVYYPKKFFKTHDRVFKELEEKKDAIQRKKDKEISKKIADLWEQRMQIPQYYYENNDLFVMMPHGTSDLKKEGRSLNHCVAGYKEFVAEEKTQIFFIRKKAAPQKSFYTLEIKNHDIEQCHGKNNVNMTEEIRAFAYGFLNQLKTIKEKPAVRAAA

SEQ ID NO: 2977 - protein, 484 aa, Unknown
  Description of Unknown: uncultivated organism sequence
  Category: MG91 effectors
  Description: MG91-169 effector
MAHKENQKAFVVTFPLHTEKWQEDRIDKMMRMLTTFYNDRQRKLVRRYIYLSHSKAYKEAKDKGVVAFKNYMKEHGFSQYGLDAFFKADTKGALYQCGLNSMFLQYLSQCAWSAWDKKLFGKGDFVKTDKVVNIFCSRNMKGRFCGFDYDLSTFTIRIKSTCTKKIICTIPFVVNKNSEYELYALSQKICRIGIVRKLIRSKYKYYVQFTFDGVPYNKGRNIGTGIVGIDPGPSKIAIVSDEKVEIAKLAPGIEEDERKTARLKRKLDRSRRATNPHMYKENGTNIKGQRQICFSKSYNETRKQLADAQRKLAAKRKIAHNELANTLLEYGDTFKVEANSYKSMQARTKATSMTKSGRIRSKKRYGKSIKNRAPSELLVILKNKLLYYPKGKYYDVPSSYACTQFDFTNESFTEHKISERRIVTSDGIQHNRDTLAAFNIKNTIVNDTSTKKKKVTKSKEFFDIVKMKASYNEFCLMERYLLSV

SEQ ID NO: 2978 - protein, 511 aa, Unknown
  Description of Unknown: uncultivated organism sequence
  Category: MG91 effectors
  Description: MG91-170 effector
MPSQATTPSFVVELQLRIGSDVEQVLERTFRLAQCLHNATLCTVLKRDGELRASDAWRAAKAMPKGKERTAEFKRLMESAGLTKNGFEKILLDHLRKSGRRDQIDSNTEQKIADRLWDAYQRWRYENGGKPRYKGKRRGLHSLEGKTNKSGIRWKPDNQCIEWLGCRMLARVDKSDELLMRALADPQDPQKPRKVKYCRVLWRNINKRKRWFVQLVCEGTSPVKHVFAPADIKAGIDPSLRSMTCFVEDGTVEKIDISAGLAKSARTIRNVQRRVERKRRSNNPKNYDEKGRVKKGPLKWNISKKQRDLEAKLAECHRKAAAHRKNKAGELANWLLGRAGCIHVEKNQFKAFQRSGFGRSILKGAPRQCITMLKAKAASAGLKVFEVSPRKLRPSQHDIETGEFIKHGLSERWIKLGESGLWINRDAMAALNLLWVDESGENYLPSDDCKKHWEAVKCVLLDAGWLVQLEARDEASEIFLRRFRRKDRPALTVGELRQKRNRGRSDDSSAA

SEQ ID NO: 2979 - protein, 530 aa, Unknown
  Description of Unknown: uncultivated organism sequence
  Category: MG91 effectors
  Description: MG91-171 effector
MTSQSFVIELPIAVDDAEMRTIVRKLEFARQLHNATLGTAMGQLQQMRQDAAWKEACVMPKGKERAAAFRALDRKYGLTEYDLHSVIARHREGSGRKAELGINETQKIATRVFQAINRYKLGLGGMPRFKSSKRGLHSIEGKTNKTGLKFRPEKKVLNWCGHDYRVLIDPKDDYIQRALKENERSDKYRKIKYCRLVRKRIRSSDRFFLQVVLEGTAPVKHVYAPVTERAAIDPGPQSIALFSKEFAGKIQVAGSNNFNEAVSRRLLRAMDRSLRRNNPDAYNEDGTIKKGTKLVKSKNYQRKVDRLREMHRVAAAERKCRHGQTINLLLSIAGDIRIEKNSWKAFQRGHFGKSLGKSAMSGFIAQLKSKAASAGLKVTEVNPYKLKLSQYDPYTDTYRKKDLSERWQEMKAGSGQYIQRDILSALLLYCADIEKEIHIPKVAVEQLEGAKQFLTDAGYVVLKSTSSRDQRDPRLASEPKAMTPEMARQKILRGAGDSHLPTDQALGRIRAGGKVSTWSKETFPLQRGVV

SEQ ID NO: 2980 - protein, 530 aa, Unknown
  Description of Unknown: uncultivated organism sequence
  Category: MG91 effectors
  Description: MG91-172 effector
MTSQSFVIELPIAVDDAEMRTIVRKLEFARQLHNATLGTAMGQLQQMRQDAAWKEACVMPKGKERAAAFRALDRKYGLTEYDLHSVIARHREGSGRKAELGINETQKIATRVFQAINRYKLGLGGMPRFKSSKRGLHSIEGKTNKTGLKFRPEKKVLNWCGHDYRVLIDPKDDYIQRALKENERSDKYRKIKYCRLVRKRIRSSDRFFLQVVLEGTAPVKHVYAPVTERAAIDPGPQSIALFSKEFAGKIQVAGSNNFNEAVSRRLLRAMDRSLRRNNPDAYNEDGTIKKGAKLVKSKNYQRKVDRLREMYRVAAAERKCRHGQTINLLLSIAGDIRIEKNSWKAFQRGHFGKSLGKSAMSGFIAQLKSKAASAGLKVTEVNPYKLKLSQYDPYTDTYRKKDLSERWQEMKAGSGQYIQRDILSALLLYCADIEKEIHIPKVAVEQLEGAKQFLTDAGYVVLKSTSSRDQRDPRLASEPKAMTPEMARQKILRGAGDSHLPTDQALGRIRAGGKVSTWSKETFPLQRGVV

SEQ ID NO: 2981 - protein, 723 aa, Unknown
  Description of Unknown: uncultivated organism sequence
  Category: MG91 effectors
  Description: MG91-173 effector
MAEEKEMRSYNIRINPDADAIKVIERDMKLMEQLYGFIIYKIESHIQQLRDETEYGEYDSNYKEYCRLMAEAEQKKRQCEVLRDAKKRKNIEDPELDSQYKELSAEIIKLDKHRKEWCRKCCEFFKNNKKALCHFVFESRRKVIRLKSDMVTPTENSGFILHHGVNGELYYIYDKTYYMMVEDSIRKANKGDGYSALVCECGVVTKRVSLNEDKTFKDKVYDGVAVLTDDGEIIMPYEYLRIDKLNKNNAHSFSILFVGEYVYSLNKNPKTKKSQKTSMAYKDFGFTSTDFFENIGNRLTLSYADFPKLLSQKHRKNDFMTIMCGYQSKLMDIMCDESGGYFVRMVTHSYGRGKKKYVDIPVLVSHRNKNRIGTERDMDTKVLEKKLKLLETGKTNVIGISKDVIREKSRYYVNIFLEHTGSLGLEYNENSLNQELGVGSVGVDPNMHQIAVYSDSLKKSTIFSLETIRGGIFKQKIYDCYSKLNSLQTKMSRCMDENNSGAKDENGNFIKGKKLFKSKRYLAMKKEVGELHRRIAELKETANIFIAHELLSYGNVFYIEDPRSAEKKRRMQGVVYDVKGRVVKNRKFSRSIQKFSISGMIYKALDVIESRGGKVYWINNKSAATAYVPKGDNVSHGMGERVFNWLGYKVQRDMKSGYVLSGCKELEQTKETYLNKPIYKVVSYDDERLLNDVDVFAESVKEEMERCRDLNVEDKTIGVEKYF

SEQ ID NO: 2982 - protein, 1129 aa, Unknown
  Description of Unknown: uncultivated organism sequence
  Category: MG91 effectors
  Description: MG91-174 effector
MKKLLSINLGITSIGYSVLNELDNDKYSLIDYGVNMFDTPYDKDGNSKKLIHSQIKSTKKLYELRKERKKNLSKLFEDFGFAKKEDFLNQEKENLFINKWGLRAKKAFEEKLTFQELFSILYLIAKHRGYKSLDTDDLLEEFCEKLGLNQEKKKDNGKDNEKGKIKQALKTIETLKLQFPQKTIPQIIYEVEIQKENPTFRNHDNYNYMIRREYINEEIKALVLSQEKFGLFDKNFDSKAFIEKLIETIDDQKESSNDLSLFGNCEYLKNEKVAHQYSLLGDIYKMYQSVANITFNSNPTIKISKEQIKLIANDFFDKLKNGKNISDIKYKEIRKILKLSDDFKIFNKEDSYKSKDKTQENSITKFHFVNNLSKFDKDFIKSILEKSNKYDILKEVFDVLRDEKQPKPIYDKLNNIFSKYDLIKNESIKNNTILELIKNKTGSSLSISHQAMINIIPYFEDGSTIDEIKQKLNLSREEDYLSYKKGIKYLSVAQFENNNNLPINNHPVKYVVSAALRLIKHLHVTYGAFDEIRVESTRELSLNDESKRNIDKVNRENEAKITAILENIEYQQIAQTYGKKLEKYARKILIWDEQERFDIYNGKSIGFGDIFSNSVDIDHIVPQSLGGLSVKHNLVLVHRDTNLQKLNQLPLNFIADKQGFIDRIEYLFKEHKISWKKRKNLLATNLDDTYKDTFESKSLRATSYIEALTAQILKSYYPFPNQTKNSMEVRHIQGRTTSNIRKLLKVKTKIRNTNIHHAIDAILIGLTNQSWLQELSNTFRENMGVIDDVARQNIKKVIPLIEGIEPKELIEMIENNYNAYGEDSIFYKDIFGKTKAVNFWVSKKPMVSKIHKDTIYSKKPNDFYTVKENILNQFIALKVNNDTKANKFYEDFKKNILEKMYVYKTNPNDVICKIVQNRAYDIKELLTSFETIDKKDKEALSEAKQKLDTLIHNPLLDNNNKPIRKVKFYQTNLTGFNIRGGLATKEKTFIGFKASLKNDKLFYERIDVANKNNIKDNDFLIIRNNLICINFKNKNLLGFVESFDENTNKIRMYDSRYPKRLENQPERFKVASGKGRKEFGIAGAIGIIKLNLDILGNINSYQIIGTIQNELYSFFKKLKNDKGNLPINT

SEQ ID NO: 2983 - protein, 1350 aa, Unknown
  Description of Unknown: uncultivated organism sequence
  Category: MG91 effectors
  Description: MG91-175 effector
MSNINYYLGLDLGTDSVGWAVTDPNYKLLRAKGKDLWGIREFEAAKTSAERRSYRTSRRRKQRKTVRIGLLKEYFKDEIDKVDSNFYESLENSFFKKEDKPEGARSKNLLFNDKDFKDSDYYEKYPTIFHLRSELIHSKEPHDVRLVYLAILNIFKHRGHFLNENLSTSSTSVSIEEVYSELRNLLIDKTDIKLPDKIDEKNFEEVMCDRGLSRSEKQKRILDQLEISSKDKDKVEIIKAICGLKVDAKKIFPIESDEKLAFCFAEARFEEIQGDLENSLGDDYFSIIMLMKQIYDTCAWDTVIKGFEYLSDARIDSYNKHARDLKILKKVLKKKGQDAYDRFFRTEEDGTYGDYVGSNVNDGKVGRRGGNKHTRDDFYSAVKNEIKGVDDLDVEVIQSDIDNGTFMPLQLSRDNGIIPYQAHYKELDAILENAQKYLPFLSEKNAESQMTISEMIKKIFAFKIPYFVGPVTEESKKNNGNGWVVRKEEGPVLPWNIDSKIDMEKTSEEFINRLIRKCTYISGEKVLPKNSLIYERYMVLNAINTIAIDGERISVELKQQIYNDLFSKGTVVTKEKLAKYLSGRGLINSKNQISGMDDRINNTLSNYNKFYRIFGNEIKKDSTQNMIEEIIRLCTIFGDSKKDLKNKLEKEYGDKLSKEQLKSILGIKCKDWGKLSKAFIELQGADKSTGEIFSLINALWNTSFNMMELINSDEYTFKEELNKKMETGLKPVNEMVYEDLDGMYLSAPVRRMVWQTLLVIRELEKVLGCPPKKVFVEMTRGDGEKVRTKSRKDVFSELYKKIKEDTPKWLEIIGKAEENGTIRSKKMYLYLRQKGKDMYTGKPISLDDLFNDNLYDIDHIYPQSLTKDDNLDNNMVLVNKSDNSNKQNVYPLSEDIRNKCKGLWKELHDQGFINDEKYSRLTGRSPLTDEQLEEFIARQLVETSQGTKAVAQIMSGAMPESKVVYSKARVVSDFRNKYELLKSRLVNDFHHANDAYLNIVVGNAYLVKFTDNPKRYIKEEYNKDKEKYRYNLAKFFENDVIRGKEVAWVSTKENGEIGTIATVKKMMSKNTPLLTRMNFVGHGGIADQTLYGTDKAKEDGYLPIKGKDSKFKVSKYGGYNKASTAYFFLVESEVKGKKQRTLETVPIFLAAEIDRHPGKLEEYCINDLGLINPDIRIRKIKLQSLVKKDGYLIHITGKTLDRIALRNATGLKLDISWINYIKKLENFAEKGSMESGVISKDKNIELYKLLMDKHKNGIFKNRPNPIGEKLENKLSMFMGLEQEKQINVLVQLLNTTAIVSAAKADLTDIGEAKATGVMLISKKIEGYKRIFLVNQSVTGLYEEEIDLLTV

SEQ ID NO: 2984 - protein, 610 aa, Unknown
  Description of Unknown: uncultivated organism sequence
  Category: MG91 effectors
  Description: MG91-176 effector
MIIFTKISEFIISYWMPVKKDDKPRFVLEMPLKVEQWQADILNVRYELMRRMYNQARRILLSHFYYMVQKNEYQECASNKRERAVYIKNHPIFIKGVTDKKGNVKPITFTEFGIKDVVLSFVTRDVGSGKTYKDFGINTSFADCVASNLWAAWEKFMYDGKCKGVAFKRRFNTISIGKNNGCFGGLKLSLESMTLSVNVNGKQKGNAKFITLPVCGDNQSEYEMQALQGGLESICVVSIARKLIRGKYKYYLQLTIKGHAPNKGRALGCGTVGVDVGPSTVAFVSQSDVQINRLASECDDIEDVIGKIQQKMDRSRRATNPQNFNEDGTLKRISRKNGERRIWNDSRRYRLLCKQKAELQRKQAAVRKMSHILKINQILSLGDTFFVENNPISQWTKRAKETKVSEKTGRYCSKKRAGKSVANHAPAMFVTLLKNKVQSLGGRCREVDIKNAASRFDFTDGQFKVHGLDERIVTLSNNKTHQRDILAAFNLQHIICVDDDKKLKKYDIVRMYADYPAFCDMERAEIEKFVSGEKETDRHTIGAIEELKVVLSSHADDPSVLYSVDKLSANSEGNKTGKKAGSALVHESNDRVLEVLNESTLFTIKDLHVT

SEQ ID NO: 2985 - protein, 1127 aa, Unknown
  Description of Unknown: uncultivated organism sequence
  Category: MG91 effectors
  Description: MG91-177 effector
MSKKILSLDLGITSIGYSILEEVSENRYSLLDYGLSMFDKATDKDGNSKKLLHSSASSAKNLYTLRKERKKSLAKLFELFNFSTSLKLLNQEKENLYINKWELRAKEAFCRRLEVGELFSILYALAKHRGYKSLESGDLLEELCEELNLECNLTKKTEDEDTGKIKLALKTVESLRLDNPHKTVAQIIYEEEILKFTPTFRNHDNYNYMIRREYINDEIKKILLAQEKFGFFKSDFDVTAFIDSVIEIIDDQKESTNDLSLFGNCEYYPKHKVAHQYSFLSDIFKMYESVSNITFNTKPTLKITPSQIKLIAEDFFAKVKKGKNIGDIKYKDIRKVLKLDDDVKIFNKEDSYLRAGKKIENSIIKFHFVNSLSKIDNSFIVIALEDERGYEVLQNIFDVLAYEKSPKSIYEKLKNLVDEKTIIALIQNKHGNSLNISHYAMLQFIPYFEEGLTTDEIKKKIGLERKEDYSKYRKGIKHLNIVEFEKDENLEINNHPVKYVVSATLRVVKHLHSVYNGFDEIRVESTRELSQNEQTKKDIEKANRAQEKEFSRIVEDKEYQKIADSYGKNIKKYARKILLWEEQEYLDIYSGKVIGLGEIFSNEVDLDHIVPQSLGGLSVKHNFVLAHRDTNVQKSNRLAVDFVSDKEAFINRVEHLFSSHKINWKKRKNLLATNLDETFQDVFESKSLRATSYIEALTAQLLKCYYPFIDKKKQVDGSAVRHIQGRATSNIRKLLGVKTKVRDTNIHHAIDALLIGFTNHSWLQKLSNTFRENKGVINDEARAKIKKEFPIIELVVNDEVEYLEPKELCERIENTFNCYGEESVFYKDIWGKNRVVSFWVSKKPMVSKIHKDTIYAKKKEGIFTVRENIINKFIGLKITPTMSSQKFMDIFKKNILEKMYLFKVNPKDFISLVIQKRADEIAELLESFETLDKKDKESMSQAKVDLEVLIHKEILDNSENSIRKVKFFQTNLTGFDVRGGLATKEKTFIGFRAWLEDDKLHYVRIDVANFKKIQKLNDSSFKVYKNDEIFFIMPDGSRRGGKIVSFLEETKKSAFQNAKYPTSSEYQPMQFCKMDKGKKSGAKQQSIGKAIGIIKLNIDIIGNIKSYQVIGNAESELLDFVKETVHG

SEQ ID NO: 2986 - protein, 1127 aa, Unknown
  Description of Unknown: uncultivated organism sequence
  Category: MG91 effectors
  Description: MG91-178 effector
MSKKILSLDLGITSIGYSVLEEVSENRYSLLDYGLSMFDKPTDKDGNSKKLLHSAASSTKNLYTLRKKRKKSLAKLFELSDISTSSKLLNQEKENLYINKWELRAKEAFCRRLEVGELFTIFYALAKHRGYKSLESGDLLEELCEELKIEYNFTKKKEDEDKGKIKLALKTVESLRLENPHKTVAQIIYEEEILKSTPTFRNHDNYNYMIRREYINDEIKKILLAQEKFGFFKSDFDVTAFIKRVIETIDDQKESTIDLSLFGNCEYYPKYKVAHQYSLLSDIFKMYESVSNITFNTKPTLKITPSQIKVIAEDFFAKVKKGKSIGEVKYKDIRKILQLGDDVKIFNKEDSYLRAGKKIENIIIKFHFVNSLSKIDNSFILNALEDERGYEVLQKIFDVLAYEKSPKSIYEKLKNLVDEKTIIVLIQNKHGNSLNISHYAMVQFIPHFKEGLTTDEIKKILGLERKEDYSKYRKGIKYLTIAEFEKDENLEINNHPVKYVVSATLRVVKHLHSVYGAFDEIRIESTRELSQNEQTKKDIEKANRALEKEFSRITEDKEYQKIADSYGKNIKKYARKILLWEEQEYLDICSGKVIGLGEIFSNEVDLDHIIPKSLGGLSVKHNFVLAHRDTNVQKSNRLALDFVSDREAFINRVEHLFSSHKINWKKRKNLLATSLDETFQDVFESKSLRATSYIESLTAQLLKCYYPFTNKKKQLDGSAVRHIQGRATSNIRKLLGVKTKVRDTNIHHAIDALLIGFTNHLWLQKLSNTFRENMGLIDDEARAKIKKEFPIIELVVNDEVEYLEPKELCDRIENAFNSYGEESVFYKDVWGKNRVVSFWVSKKPMVSKIHKDTIYEKKKDGIFTVRESILNKFIGLKITPTMSSQKFTDIFNKNILEKMYLFKVNPKDFICVVIQKRADEIAELLGSLEALDKKDKERVSKAKVDLEALIHKEILDNNGNSIRKVKFFQTNLTGFDVRGGLATKEKTFIGFRTWLKEGKLNYERIDVANLQKIEKLNDSSFKVYKNDEIFFIMPDGSRRGGKIVSFLEETKKSAFQNAKYPTSSEYQPMPFCKMNKGKKSGAKQQSIGKAIGIIKLNLDIIGNIKSYQVIGDAKSDFLDFVKESIRG

SEQ ID NO: 2987 - protein, 1351 aa, Unknown
  Description of Unknown: uncultivated organism sequence
  Category: MG91 effectors
  Description: MG91-179 effector
MKYYLGLDMGTDSVGWAVTDEHYNIVRAKGKDLWGIREFEEAKTAADRRIQRTSRRRLEREKARIGLLKDYFKDEIDKVDPSFYARLDNSFLKIEDKAEEVQYKNILFNDEDFTDRDYYKKYPTIFHLISELIHNTTPHDVRLVYLACLNIFKHRGNFLNPALSKDNTRIDISDKYTELRQALSEQTNIILSEEFNENSFKAIMCDSSKSRTLKYEGLKDLFSIEKSDKQKQEILKAIAGLKVNAKNIFDLDTEEKIEFSFYEGNFDDKAAELEKEMGEDFFNIIALMKEIYDACEWDTVMAGYEYLSDSRVASYEKHKKDLVILKRAFRNNKSKDDYERFFRTDEDGTYGDYTGSNNSREKHRRRGSKHRQEDFYDSVKKEFKGLEKNGDPDIDYILTEISNGTFMPKQLTPSNGVIPFQAHYKELNAILNNASNYLGFLNDIDSESGQSVKADILQIFEFKLPYYIGPVTTKSAENGGNGWVIRRENGKVLPWNIEQKIDTKATSEAFIQRMVRKCTFLSDEKVLPKSSLLYEKFSVLNAINAISIKGERISTNIKQDLYHDKFENGKKVTKTQIVRYLNGRGLDVTENDITGIDDIITSQLSTYHRFYQIFGDDMKKDSYKNMAEDIIYLSTIFGDEKKFLKDKIKEKYGDKLSDEQIKKVLSIKCTDWGKLSKEFLELKGCRKNTGEEISLIDAMWETSLNLMELINSDEFNFNEVLNERQTKAFSSLKELKPEDLDDMYFSAPVKRMVWQTLLIIKELEQVIGSAPERVFVEVTRSHEESKRTVSREKLLLDLYKNEDKYWKDIISEASVNGRIRSKRMYLYLKQQGKDLYTGKEIPLDEVFNKGKYDIDHIYPQSLTKDDSLDNNMVLTDKSVNNHKQNIYPLEKSIRDNCYALWTALHAKGFINDEKYKRLTGNQPLTDGQLEGFIARQLVETSQGTKAICDILTQALPATKVIYSKAKVVSDFRNQYHIYKSRIANDLHHAHDAYLNVVVGNSYYVKFTDSPHRFIKERFRCDGGKYNYNLATFFESDVSNGKETAWIGSGKEYNNDNEKGTILTVRKMLAKTSPMMTRLNFVNKGSIAKEQLISADKCKKDSYLQIKVNDARLDVTKYGGYQKVSAAYFFLVESAGKKGEKIRTLETVPVYLADKIEKNPALLEQYCKDILKLNNIRISVRKIKIQSLIKRNGYFLHISGKSSNQILLRNATNIFYNQEKINYIKKIEKYVDKQEVDEEINTEKNIELYDYLTAKHNGKILLHRPNPIGEKLTKRKDKFAELSLAEQILCLYEILTSTAIVAGGAANLKQLGESPSTGVMTMNKNISKEKELLLINQSVTGIYTNTIDLLKI

SEQ ID NO: 2988 - protein, 64 aa, Unknown
  Description of Unknown: uncultivated organism sequence
  Category: MG91 effectors
  Description: MG91-180 effector
MKVEKWQADILDKRYEYLRQIYNIVQQKLVRQYIYFSQQKAYRDCKNHINDCGLEIKYNTKNYE

SEQ ID NO: 2989 - protein, 1122 aa, Unknown
  Description of Unknown: uncultivated organism sequence
  Category: MG91 effectors
  Description: MG91-181 effector
MLKRILSLDLGVTSIGYSVLEEKENDKYSLLDYGVSMFDAPYNKDGNSKKLLHSQNASTSKLYHLRKKRKKDLAKLFEKFKLGKSEEFLKQEKQNRYKHKWELRGKEVFERKLDISELFTIFYFLAKHRGYKSLDSSDLLEELIEKLGLSKEEKKSKKDDEKGKIKQALRTIEDLKQKFPEKTVASIIYMIEMQKSNPTFRNHDNYNYMIRREYINEEIEKILNIQKEFGLFDKSFELDKFTKELKEIITVQKESTNDLSLFGKCEFYPEYKVAHQYSLLSDIYKMYQAVSNITFDKSKIKIKKEQIQKVANFFLKKIKSGKKISDIKYKDIRAILNLDDAVKIFNKEDNYLRKGKKQENTIVKFHFVSNLAKFDNSFILKAFEKENPYRELKEIFDVLHEEKSPKSIYEKLKDKVDKKTIIELIKNKSGNSLNISSEAIIKCIPYFEDGLTLDEIKQKLDLKRSEDYSSFKKGIKYLHVNQFEKDDKLEINNHPVKSIVSITLRLIKYLHAIYGNFDEIKVESTRELSQNEQIKEDIKKANRDLEKKIDEIVENTEYQNIANQYGKNLKKYARKLLMWEEQERLDIYSGESIGLADIFSNIVDLDHIVPQSLGGLSVKHNFVLVHRNSNLKKSNNLPINFISDKQGYINRVEHLFSEHKINWKKRKNLLAENLDEIYKDTFESKSLRATSYAEALTAQILKRYYPFTNKTKQKDGSAVKHIQGRATSNIRKLLHIKTKSRDTNIHHAIDAILIGVTNHSWLQKLSNTFRENFGVIDEVVRKNIKKAVPYIEGMELKDLVNEIEQNYNSYGEDSIFYKDIWGKTKAINFWVSRKPISSKIHKDTIYAKKPNGIFTVRENIINKFIALKITAKTKPEDFINKFEKDILKKMYLYKTNSNDVICKIVIQRAKDIQKLLVSFENLDTKDKEVMTDAKSKLNALIHSDLIDNNGNIIRKIKFVPKTSPKDGFDIRKGKAISEKTFIGFKTYLEKDKLKYNRIDISNTQKINGKFVVYSKGFKVFKNNLVFFIFSDGTYKGGKIVSFLADKGIAAFSNSKFPASIANQPHSFLTFFNGKPNSHKQHSINKAIGLIKLDLDILGNIKSQQTIGNVQSKLFDFIKEILK

SEQ ID NO: 2990 - protein, 1116 aa, Unknown
  Description of Unknown: uncultivated organism sequence
  Category: MG91 effectors
  Description: MG91-182 effector
MKQILSLDLGITSVGYSVIQEHETDKYSLIDYGVSMFDKPTDKDGNSKKLLHSQALSAKNLHKLRKKRKQNLASLFEKYHLDNRERLLQQEKDNLYKNKWELRAKKVFEKQLSIGEIFTILYHIAKHRGYKSLDSGDLLEELCETLGIETETTKPKKDDERGQIKQALKSVEALREEYPQKTVAQIIYELESKKENPIFRNHDNYNYMIRREYINDEIRKIIKVQIAFGAFRTIDDAFINDVIAVIDDQKESTNDLSLFGKCEYYPEYYVAHQYSLLSDIFKMYQAVANITFNKEKIKITKEQIALIAEDFLGKIKKGKSVKDIKYKDIRKVLKLDDDIKIFNKDDSYLNKGKKQENTITKFHFVDILSKIDKSFVEDIFASDKSYTIMREIFDVLHYEKSPKLIYKQLKNKISDEQVIIDLIRNKKGNSLNISSFAMLQLLPYLKEGLTLDEVKQKLGLQRQEDYAEYKKGIKYLHITNYEKDDELEINNHPVKYAVSAALRVVKHLHTEYGTFDEIKVESTRELSLGEKARKEIEKANKAFEKEIEQIVENVEYQKIAKSYGKNLRKYARKILMWEEQERLDIYSGKSIGITDIFSNSVDLDHIVPQSLGGLSVKHNFVLVHRDENLQKSNQLPMNYIKDTQAYTNRVEHLLREHKINWKKAKNLLATNLDEVFKDRFESKSLRATSYIEALTAQMLKRYYPFKDVRKLKDGSAVRHLQGRATSNIRKVLGVKTKSRETNIHHAIDALLIGVTSHSWLQKLSNTFRENFGCIDDEARKNIKKALPYMDGLEIKDLVKEIEEQYNSFGEDSIFYRNIWGKVKTVNFWVSKKPMSSKVHKDTIYAKKGDGIYTVRENIIAKFIGLKVIPTTSPEEFMKRFHKNILQKMYLFKTNPHDVICKLVEQRGEEIKELLWSFEFLDVKNKEEMSEAKTKLELLIHKDLLDNNGNVIRKVKFYQTNLTGFDVRGGLATKEKTFIGFRAYKENEKLEYERIDIANIEKIQKVNDGSFKAYKNDVVLFIFDDKVYKGGKIVSFLEEKKMAAFSNPKYPANIQSQPESFLTMFNGKANSHKQVSISKAKGIIKLYIDILGNIKSYQVLGNAKSKILDEIKSIVSH

SEQ ID NO: 2991 - protein, 1136 aa, Unknown
  Description of Unknown: uncultivated organism sequence
  Category: MG91 effectors
  Description: MG91-183 effector
MQEEEIMSKKILSLDLGTTSIGYSILNEMDNDRYALIDYGISMFDKATDKDGKSKKLLHSASQSSANLHDLRKERTQNLAMLFEKYKLGRVDALLEQERENRYTDKWYLRAEKAFSEKLETEELFTVLYLMAKHRGYKSLDTDDLLEELLLDLGFEVEEKKEKDAEKGKIKQALKAVESFRQKYPEKTVARIIYEIEIKKDNPTFRNHDNYNYMIRREYINEEIRKIVQAQSKFGLFAKDFDVEVFIKELIVTIDDQKDSTNNLSLFGNCEYYSEHKVAHQYSLLSDVFKMYQSVANITFRKIKITKEQIQIIADDFFKKIQIGKNIADIKYQDIRKLLKLGEGVQVFAKEDYHLDKKGKKVHHTITKFHFLANLSKIDNRFIKSAFEKENKFEILKEIFDVLEFEKAPRGIYIQINEIFMKHKLVDDERLKDETIINLIKYKSGSSLNISAYTMIKFIPYFEKGMTSDEIKQVLKLERNEDYSNYKKGIKYLHTTNFEKDDNLEINNHPVKYVVSATMRLVKHLHATYGAFDEIRVESTRELSQNEETKKAIEKANRENEVKFQKIIENEEYIKIANHYNKNLKRYARKLTLWEEQEKLDIYTGKTIGFEDIFTNAVDIDHIIPQSLGGLSVKHNLVLAHRDDNVKKSNQLPMNFVKDKVDYVNRIEYLFKEYKINWKKKINLLATTLDERYKDTFESKELRATSYIEALTAQMLKRYYPFPDKKKQANGQAVAHVQGRATSNIRKLLGVKIKVRDTNIHHAIDAILIGLTNKSWLQKLSNTFRENMGVIDDRARANIKKEIPLIEGIDPKELVELIEDAYNVYGEESVFYKDIFGKTKAVNFWVSKKPMSSKIHKDTIYAKKPNGLFTVREDIIKQFIALKITTTTDSELFMKAFEKKILQKMYLFRTNPNDVICRIVKSRGDELKSLLQSFVGVDTKDKEIMAEAKEKLDALMHKELLDNNGNTIRKIKFYQSNLTGFDIRGGLATKEKTFIGFKAVLEKEKLVYERIDASNFKRIKKENDASFKVFKNDVVFFVFSDNTFRGGKLVSFLEDGTIASFQNPRYPAAVQFQPSLFCILGKDKEGNPKKSSSKQYKNGKAIGIIKLNLDILGNIKSYSKFGEVSQEVEKSIFHKE

SEQ ID NO: 2992 - protein, 1104 aa, Unknown
  Description of Unknown: uncultivated organism sequence
  Category: MG91 effectors
  Description: MG91-184 effector
MKKILSLDLGITSIGYSILEKKQNNHYTLIDYGVSMFDSPFDKDGKSKKLLHSTNTSMSNLYAKRKQRKKALAKLFEEFGLEKAHKLLQQEKQNIYKNKWQLRCDDVFTRELSVGEFFTILYFIAKHRGYKSLDTNELLEELCEELKLNCEMKSSKKDDEKGKIKQALKRVEELKQNTNKTVAQIIYELELQKQTPTFRNHDNYNYMIRREYIEDELKKLVDAQQHFFKNNKDEFFEKLKEIIIKQDESSNDLNLFANCEYYKEHKVANQYSVVADIFKMYESVANITLNKEKITKEQIKLIADDFFIKIKKGKNIADIKYKDIRKILKLSDDIKIFGKSDSYVSKGKTIHNTIIKFHFLNNLSKFDNSFIVQNLDNLEKLAEIFEVLNKEKSPKTIFEKLNGNVDEKTIIKLIRYKSGKSLNISHYAMLKFIPYFQEGLTTDEIKQKLDLNRCEDYLAYKKGIKYLHINQFEKDDNLEINNHPVKYIVSAVMRVVKHLHTLYGAFDEIKVESTRELSLDDKTRKDIQKANQEFEKKLDDIKQNSQYQQIAQEYDKNLSKYTKKILMWQEQDRVDIYSGKTIGLNEIFSNEVDIDHIVPQSIGGLSVKHNLVLVHRDTNLQKSNQLPMNFVADKVGLKNRVEKLFSEHKINFKKMKNLLATNLDEIYKDSFESKSLRATSYIEALTAQMLKRYYPFADKQKQKDGSAVRHIQGRATSNIRKLLHVKTKVRDTNIHHGIDALLIGVTSHSWLQKISNTFRENFGVIDDKARERVKKELPLIEGVSVAELVAHIEENYNIYGEESVFYKDVFGNVRVVPFWVSKKSMVSKIHKDTIYAKKQNGIFTVREKILNKFISLKITPKTSSDEFMKKFKKEILEKMYLYKTNPKDKICAIIEQRAFEIAKLLDSLQLKDTTDKEMLSETKKYLDEFIHQDLKDYNGNVIRKVQFYQTNLTGFEIRGGLATKEKTFIGFSAILNGKKIKYKRIDVANFESMKKVDGFKVYKNDVVFFIYPDGSFNGGKIVSFLEDKKMASFSNPRFPANIGLQPHSFVTLFKGKANSHKQHSLNKAIGIIKLNLNVLGNIKSFSSMDEVDGELLEFLKGLKG

SEQ ID NO: 2993 - protein, 484 aa, Unknown
  Description of Unknown: uncultivated organism sequence
  Category: MG91 effectors
  Description: MG91-185 effector
MAHKENQKAFVVTFPLRTEKWQEDRIDKMMRMLTTFYNDRQRKLVRRYIYLSHSKAYKEAKGKGVVAFKNYMKENGFSQYGLDAFFKADTKGALYQCGLNSMFLQYLSLCAWSAWDKKLFGKGDFVKTDKVVNIFCSRNKKERFCGFDYDLSTFTISIKSTCTKKIICTIPFVVNKKSDYELFALSQRICRIGIVRKLIRGKYKYYVQFTFDGVPYHKGRNIGTGIVGIDPGPSKIAIVGDNKVEIAKLAPNIEEDERKTARLKRKLDRSRRATNPHMYKEDGTIIKGQRQTCFSKVYNETRKQLADAQRKLAAKRKIAHNELANTLLEYGDTFKVEANSYKSMQARAKATSMTKLGRIRSKKRYGKSIMNRAPSEFLVILKNKLLYYPKGKYYDVPSSYACTQFDFTNESFTEHKISERRIVTSDGIQHNRDTLAAFNIKNAIVNDTSTKKKKVTKSKEFFDIVRMKASYNEFCLMERYLLSV

SEQ ID NO: 2994 - protein, 1126 aa, Unknown
  Description of Unknown: uncultivated organism sequence
  Category: MG91 effectors
  Description: MG91-186 effector
MSKKILSLDLGITSIGYSILEELNNDRYSLIDYGVSMFDKPTDKDGKSKKLLHSASVSAKKLHTLRKERKTNLAQIFEDYKLSNKTTLLNQEKQNIYTNKWELRAKKAFEEKLEISELFTIFYVLSKHRGYKSLDSDDLLEELCQKLGIEVDTKKATKEDDEKGKIKKALQTIENLRIKYPDNTIAQIIYETEILKENPTFRNHDNYNYMIRREYINDEITKIIKAQNGFKAFNFDVDEFIEAIINTIDDQKDSTNNMDLFGNCEYYKEEKVAHQYSLLSDIFKMYQSVSNITFNIAELCEVNPLQKNIKIQKEQIKLIADDFFTKIKKGKNIADIKYKDIRKVLKLSDDFKIFNKEDSYLNKGKKQENTITKFHFVNNLSKIDNSFILNALKQDNRYEILREIFDVLSQEKAPHSIYEKLKDKVDDKTIISLIKYKNGNSLNISHHAMIKFIPYFEEGLTTDEIKQKLGLDRKEDYSEFKKGIKYLHIKTFEKDNNLDINNHPVKYVVSATLRVIKHLHTTYGAFDEIRVESTRELSQNEQTKKDIEKANRALEKEINNIVENKEYQKIADSYGKNLKKYARKILMWEEQNRLDIYSGKNIGFEDIFTNSVDLDHIVPQSLGGLSVKHNFVLVHRDTNLQKSNQLPINFIKDKQEFINRVEYLFSEHKINWKKKINLLANNLDEVFKDSFESKSLRATSYIEALTAQVLKRYYPFPNEKKQNDGSAVRHIQGRATSNIRKLLHVKTKVRDTNIHHAIDAILIGLTNASWLQKLSNTFRDNMGVIDDEARAKIKKEMPLIEGIEPKELVEMIEDRYNEFGEDSIFYKDIFSNVKAVNFWVSKKPMVSKIHKDTIYAKKQDGIFTVREGIINKFVGLKTTTTTSPSKFMESFEKNILKKMYLHKTNPKDAICQIVQKRANEIAILLESFVDLDTKNKELMSDSKVKLDELFHSDMLDNNGNVIRKVKFFQTNLTGFEIRGGLATKEKTFIGFKATLKDSKLKYTRIDVANFEKIQKENTDSFKVFKNDLVFFIYSDGSFRGGKIVSFLEEKGMGAFSNSRFPASIGLQPHSFLTMFNGKANSHKQISLNKAIGIIKLNIDIIGNIKSYQVIGDVKGELLEFIKKLTQ

SEQ ID NO: 2995 - protein, 1122 aa, Unknown
  Description of Unknown: uncultivated organism sequence
  Category: MG91 effectors
  Description: MG91-187 effector
MLKRILSLDLGITSIGYSVLEEKENDKYSLLDYGVSMFDAPYNKDGNSKKLLHSQNASTSKLYHLRKKRKKDLAKLFEKFKLGKSEEFLKQEKQNRYKHKWELRGKEVFERKLDISELFTIFYFLAKHRGYKSLDSSDLLEELIEKLGLSKEEKKSKKDDEKGKIKQALRTIEDLKQKFPEKTVASIIYMIEMQKSNPTFRNHDNYNYMIRREYINEEIEKILNIQKEFGLFDKSFELDEFTKELKEIITVQKESTNDLSLFGKCEFYPEYKVAHQYSLLSDIYKMYQAVSNITFDKSKTKIKKEQIQKVANFFLKKIKSGKKISDIKYKDIRAILNLDDAVKIFNKEDNYLRKGKKQENTIVKFHFVSNLAKFDNSFILKAFEKENPYRELKEIFDVLHEEKSPKSIYEKLKDKVDKKTIIELIKNKSGNSLNISSEAIIKCIPYFEDGLTLDEIKQKLDLKRSEDYSSFKKGIKYLHVNQFEKDDKLEINNHPVKSIVSITLRLIKYLHAIYGNFDEIKVESTRELSQNEQIKEDIKKANRDLEKKIDEIVENTEYQNIANQYGKNLKKYARKLLMWEEQERLDIYSGESIGLADIFSNIVDLDHIVPQSLGGLSVKHNFVLVHRNSNLKKSNNLPINFISDKQGYINRVEHLFSEHKINWKKRKNLLAENLDEIYKDTFESKSLRATSYAEALTAQILKRYYPFTNKTKQKDGSAVKHIQGRATSNIRKLLHIKTKSRDTNIHHAIDAILIGVTNHSWLQKLSNTFRENFGVIDEVVRKNIKKAVPYIEGMELKDLVNEIEQNYNSYGEDSIFYKDIWGKTKAINFWVSRKPISSKIHKDTIYAKKPNGIFTVRENIINKFIALKITAKTKPEDFINKFEKDILKKMYLYKTNSNDVICKIVIQRAKDIQKLLVSFENLDTKDKEVMTDAKSKLNALIHSDLIDNNGNIIRKIKFVPKTSPKDGFDIRKGKAISEKTFIGFKTYLEKDKLKYNRIDISNTQKINGKFVVYSKGFKVFKNNLVFFIFSDGTYKGGKIVSFLADKGIAAFSNSKFPASIANQPHSFLTFFNGKPNSHKQHSINKAIGLIKLDLDILGNIKSQQTIGNVQSKLFDFIKEILK

SEQ ID NO: 2996 - protein, 1129 aa, Unknown
  Description of Unknown: uncultivated organism sequence
  Category: MG91 effectors
  Description: MG91-188 effector
MKKLLSINLGITSIGYSVLNEQDNDKYSLIDYGVNMFDTPYDKDGNSKKLIHSQIKSTKKLYELRKERKKNLSKLFEDFGFAKKEDFLNQEKENLFINKWGLRAKKAFEEKLTFQELFSILYLIAKHRGYKSLDTDDLLEEFCEKLGLNQEKKKDNGKDNEKGKIKQALKTIETLKLQFPQKTIPQIIYEVEIQKENPTFRNHDNYNYMIRREYINEEIKALVLSQEKFGLFDKNFDSKAFIEKLIETIDDQKESSNDLSLFGNCEYLKNEKVAHQYSLLGDIYKMYQSVANITFNSNPTIKISKEQIKLIANDFFDKLKNGKNISDIKYKEIRKILKLSDDFKVFNKEDSYKSKDKTQENSITKFHFVNNLSKFDKDFIKSILEKSNKYDILKEVFDVLRDEKQPKPIYDKLNNIFSKYDLIKNESIKNNTILELIKNKTGSSLSISHQAMINIIPYFEDGSTIDEIKQKLNLSREEDYLSYKKGIKYLSVAQFENNNNLPINNHPVKYVVSAALRLIKHLHVTYGAFDEIRVESTRELSLNDESKRNIDKVNRENEAKITAILENIEYQQIAQTYGKKLEKYARKILIWDEQERFDIYNGKSIGFGDIFSNSVDIDHIVPQSLGGLSVKHNLVLVHRDTNLQKLNQLPLNFIADKQGFIDRIEYLFKEHKISWKKRKNLLATNLDDTYKDTFESKSLRATSYIEALTAQILKSYYPFPNQTKNSMEVRHIQGRTTSNIRKLLKVKTKIRNTNIHHAIDAILIGLTNQSWLQELSNTFRENMGVIDDVARQNIKKVIPLIEGIEPKELIEMIENNYNAYGEDSIFYKDIFGKTKAVNFWVSKKPMVSKIHKDTIYSKKPNDFYTVKENILNQFIALKVNNDTKANKFYEDFKKNILEKMYVYKTNPNDVICKIVQNRAYDIKELLTSFETIDKKDKEALSEAKQKLDTLIHNPLLDNNNKPIRKVKFYQTNLTGFNIRGGLATKEKTFIGFKASLKNDKLFYERIDVANKNNIKDNDFLIIRNNLICINFKNKNLLGFVESFDENTNKIRMYDSRYPKRLENQPERFKVASGKGRKEFGIAGAIGIIKLNLDILGNINSYQIIGTIQNELYSFFKKLKNDKGNLPINT

SEQ ID NO: 2997 - protein, 1129 aa, Unknown
  Description of Unknown: uncultivated organism sequence
  Category: MG91 effectors
  Description: MG91-189 effector
MEKIMNKKILSLDLGITSIGYAILNEIDNDRYELVDYGVSMFDKATDKDGKSKKLLHSASQSSANLHGLRKIRTKNLASLFEKYNLGNAVDFLRQERENTYIDKWYLRAEKSFTEKLKIEELFTILYLMTKHRGYKSLDTDDLLDELLVELGFEVEAKKEKDAEKGKIKQALKTVESYRKKYPAKTVARIIYEIEIKKENPTFRNHDNYNYMIRREYIREEIKKIVLAQNEFGLFTKDFDVDSFIEELIATIDDQKDSTNDLSLFGNCEYYSEHKVAHQYSLLSDIFKMYQSVANITLNKTKITKEQIKIIADDFFKKIEKGKNIADIKYQDIRKVLKLNDEVKIFGKEDYHLNKKSIKVHHTITKFHFLSSLGKIDNTFIKSTFTKENKLEILQEIFDVLEFEKAPKSIYNQLNEIFGKYVLVEDESVKNKTIINLIKYKSGNSLNISAYAMRKFIPYFEKGMTSDEIKQELKLERNEDYSNYYKGIKYLHVNQFEKDDNLEINNHPVKYVVSATMRLVKHLHATYGAFDEIRVESTRELSQNEETKKAIDKANKANEKKFQEIVENEEYQKIANHYNKNLKKYARKIMLWEEQEKLDVYTGKTIGCEDIFTNVVDIDHIIPQSLGGLSVKHNLVLAHRDENVQKSNQLPMNFVKDKKAYENRIEHLFKEYRINWKKKINLLATTLDEAYQDTFESKALRATSYIEALTAQMLKRYYPFLDKKKQANGQAVAHVQGRATSNIRKLLDVKIKVRDTNIHHAIDAILIGLTNKSWLQKLSNTFRENMGVIDDEARANIKKEIPLIEGVEPKELVELIEDAYNIYGEESVFYKDIFGKTKAVNFWVSKKSMSSKIHKDTIYAKKPNNLFTVREDIIKQFIALKITVTTDSETFMKAFEKKILQKMYLFKTNPNDVIVKIVNHRGNELKSLLQSFVNIDIKNKEVMSEAREKLDTLIHQKLVDNNGNIIRKVKFYQSNLTGFDIRGGLATKEKTFIGFRATSNNEKLFYERIDASNFKRIQKENDGSFKVYKNDVVFFIYEDEIFKGGKIVSFLEDKKIASFSNPRYPASIKFQPHSFLTLFKGIPNSHKQYSLNKAIGIIKLNLDILGNIKSYSKFGVVSKEVELKIFHKE

SEQ ID NO: 2998 - protein, 53 aa, Unknown
  Description of Unknown: uncultivated organism sequence
  Category: MG91 effectors
  Description: MG91-190 effector
MAKETFVLTLPLKVEKWQADILDKRYELLRQTYKYGATEIGTSVHLLRSTERI

SEQ ID NO: 2999 - protein, 348 aa, Unknown
  Description of Unknown: uncultivated organism sequence
  Category: MG91 effectors
  Description: MG91-191 effector
MILSFNINGKKNSKAKKIILPINVKNLTEYEMYALKDGYDSINVVTIIRKMIRGKYKYYVQFTIKGEKPQKGRTLGKGNVGIDIGPSTVAISSLNGVTIDTLAEKCNNIEDKISDIERKMDRSRRATNPQNFTEDGQIKRINRKKGEIREWKYSKRYVKLNNKKRELLRKQSAIRKLQHNIKANEVLSLGDTFIVENNPISAWAKRAKGVRKNKNGKIQTNKRFGKSIGNRAPSMFVTILQNKVKSLKGKFVPVNPKNAASRFDFTNGDFTEHNLDERKITLSNGNTHQRDMLAAFNLQHIDLTNDDLKKYNVDEMIEDYPIFCKLEKQEIKRFINGMKISNKSNIGI

SEQ ID NO: 3000 - protein, 1104 aa, Unknown
  Description of Unknown: uncultivated organism sequence
  Category: MG91 effectors
  Description: MG91-192 effector
MKKILSLDLGITSIGYSILEKKQNNHYTLIDYGVSMFDSPFDKDGKSKKLLHSTNTSMSNLYAKRKQRKKALAKLFEEFGLEKAHKLLQQEKQNIYKNKWQLRCDDVFTRELSVGEFFTILYFIAKHRGYKSLDTNELLEELCEELKLNCEMKSSKKDDEKGKIKQALKRVEELKQNTNKTVAQIIYELELQKQTPTFRNHDNYNYMIRREYIEDELKKLVDAQQHFFKNNKDEFFEKLKEIIIKQDESSNDLNLFANCEYYKEHKVANQYSVVADIFKMYESVANITLNKEKITKEQIKLIADDFFIKIKKGKNIADIKYKDIRKILKLSDDIKIFGKSDSYVSKGKTIHNTIIKFHFLNNLSKFDNSFIVQNLDNLEKLAEIFEVLNKEKSPKTIFEKLNGNVDEKTIIKLIRYKSGKSLNISHYAMLKFIPYFQEGLTTDEIKQKLDLNRCEDYLAYKKGIKYLHINQFEKDDNLEINNHPVKYIVSAVMRVVKHLHTLYGAFDEIKVESTRELSLDDKTRKDIQKANQEFEKKLDDIKQNSQYQQIAQEYDKNLSKYTKKILMWQEQDRVDIYSGKTIGLNEIFSNEVDIDHIVPQSIGGLSVKHNLVLVHRDTNLQKSNQLPMNFVADKVGLKNRVEKLFSEHKINFKKMKNLLATNLDEIYKDSFESKSLRATSYIEALTAQMLKRYYPFADKQKQKDGSAVRHIQGRATSNIRKLLHVKTKVRDTNIHHGIDALLIGVTSHSWLQKISNTFRENFGVIDDKARERVKKELPLIEGVSVAELVAHIEENYNIYGEESVFYKDVFGNVRVVPFWVSKKSMVSKIHKDTIYAKKQNGIFTVREKILNKFISLKITPKTSSDEFMKKFKKEILEKMYLYKTNPKDKICAIIEQRAFEIAKLLDSLQLKDTTDKEMLSETKKYLDEFIHQDLKDYNGNVIRKVQFYQTNLTGFEIRGGLATKEKTFIGFSAILNGKKIKYKRIDVANFESMKKVDGFKVYKNDVVFFIYPDGSFKGGKIVSFLEDKKMASFSNPRFPANIGLQPHSFVTLFKGKANSHKQHSLNKAIGIIKLNLNVLGNIKSFSSMGEVDGELLEFLKGLKG

SEQ ID NO: 3001 - protein, 1129 aa, Unknown
  Description of Unknown: uncultivated organism sequence
  Category: MG91 effectors
  Description: MG91-193 effector
MKKLLSINLGITSIGYSVLNELDNDKYSLIDYGVNMFDTPYDKDGNSKKLIHSQIKSTKKLYELRKERKKNLSKLFEDFGFAKKEDFLNQEKENLFINKWGLRAKKAFEEKLTFQELFSILYLIAKHRGYKSLDTDDLLEEFCEKLGLNQEKKKDNGKDNEKGKIKQALKTIETLKLQFPQKTIPQIIYEVEIQKENPTFRNHDNYNYMIRREYINEEIKALVLSQEKFGLFDKNFDSKAFIEKLIETIDDQKESSNDLSLFGNCEYLKNEKVAHQYSLLGDIYKMYQSVANITFNSNPTIKISKEQIKLIANDFFDKLKNGKNISDIKYKEIRKILKLSDDFKIFNKEDSYKSKDKTQENSITKFHFVNNLSKFDKDFIKSILEKSNKYDILKEVFDVLRDEKQPKPIYDKLNNIFSKYDLIKNESIKNNTILELIKNKTGSSLSISHQAMINIIPYFEDGSTIDEIKQKLNLSREEDYLSYKKGIKYLSVAQFENNNNLPINNHPVKYVVSAALRLIKHLHVTYGAFDEIRVESTRELSLNDESKRNIDKVNRENEAKITAILENIEYQQIAQTYGKKLEKYARKILIWDEQERFDIYNGKSIGFGDIFSNSVDIDHIVPQSLDGLSVKHNLVLVHRDTNLQKLNQLPLNFIADKQGFIDRIEYLFKEHKISWKKRKNLLATNLDDTYKDTFESKSLRATSYIEALTAQILKSYYPFPNQTKNSMEVRHIQGRTTSNIRKLLKVKTKIRNTNIHHAIDAILIGLTNQSWLQELSNTFRENMGVIDDVARQNIKKVIPLIEGIEPKELIEMIENNYNAYGEDSIFYKDIFGKTKAVNFWVSKKPMVSKIHKDTIYSKKPNDFYTVKENILNQFIALKVNNDTKANKFYEDFKKNILEKMYVYKTNPNDVICKIVQNRAYDIKELLTSFETIDKKDKEALSEAKQKLDTLIHNPLLDNNNKPIRKVKFYQTNLTGFNIRGGLATKEKTFIGFKASLKNDKLFYERIDVANKNNIKDNDFLIIRNNLICINFKNKNLLGFVESFDENTNKIRMYDSRYPKRLENQPERFKVASGKGRKEFGIAGAIGIIKLNLDILGNINSYQIIGTIQNELYSFFKKLKNDKGNLPINT

SEQ ID NO: 3002 - protein, 1137 aa, Unknown
  Description of Unknown: uncultivated organism sequence
  Category: MG91 effectors
  Description: MG91-194 effector
MKKILSLDLGITSMAYSIIEEFENDRYSLVDYGVSMFDKPTDKDGNSKKLLHSASTSTKNLYNLRKKRKQNLAKLFENFNLSTKSRLLNQEKQNLYINKWELRAKKAFDERLDTTELFSIFYALAKHRGYKSLDSGDLLEELYEKLGIDFQAKKEKDKSKADEKGKIKSALSTIENLRLEHPQKTVAQIIYEVELQKKNPTFRNHDNYNYMIRREYINDEIKKIILSQKEFGFFSDGFNVEEFSKRVVETIDDQKDSTSDMSLFGFCEYYKDKEQRVTHQYSLLSDIYKMYESVSNITFNSKPSIKITPQQIKLIANDFFTKVKKGKNILDIKYKDIRKILNLDDNFKIFNKDDTYLNRGKKQEHIIIKFHFVNTLSKINNQFILDIFEQENKYELLKDIFDVLCFEKAPHAIYEQLKEKIKDEKTIVDLIKYKSGNSLNISHYAMLKFIPYFEQGLTADAIKKKLGLNRKENYSAFKKGIKYLHINKFEEDDNLKINNHPVKYVVSSTLRVIKHLHSVYGAFDEIRVESTRELSQNEQTKKDIEKANRAFEKELDIIIEDVEYQKIAEQYGKNLRKYARKILIYKEQERRDIYTGEGIELKDIFTNVVDLDHIVPKSLGGLSVKHNLVLAHRDSNVRKSNQLPLYFVKDKQSFINRVEYLFEHHKINWKKKKNLLASALDETFQDTFESKSLRATSYIEALTAQVLKRYYPFPNKKKQSDGSAVRHIQGRATSNIRKLLGVKTKVRDTNIHHAIDAILIGFTNQSWLQKLSNTFRENMGLIDDEARANIKKEMPIVELIVNDKVEYLKPKELCQRVEESYSEFGEDSVFYRDVWGEVKVVNFWVSKKPMVSKIHKDTIYSKKQDGIFTVRESIINKFILLKITPTTPSQKFIENFQKNILKKMYLFKTNPKDIICQIVQNRAKSIATLLDTFKDIDSKNKELMSDAKTKLEELIHKDLVDNNGNTIRKVKFYQSALTGFDIRGGLATKEKTFIGFRAWLESDKLQYERIDVANFDTIKKKFDNSFRVFKNDVVFFVYPDGSFRGGKIVSFLDDKGIASFSNPKYPSLSEHQPKSFCKMGKDNNGNPKKSGAKQQNINASIGLIKLSLDIIGNIKSYQVTGNAESELLRFIKDVKNG

SEQ ID NO: 3003 - protein, 1117 aa, Unknown
  Description of Unknown: uncultivated organism sequence
  Category: MG91 effectors
  Description: MG91-195 effector
MKKILSFDLGITSIGYSVLTEDEAQKYSLLDYGVSMFDKPTDKDGNSKKLLHAQALSTKKLYKLRKERKKNLALLFEKYALAKASKLLEQEKKNLYMYKWQLRAKKVFEERLSIGEIFTILYHIAKHRGYKSLDSGDLLEELCVELGIKIDVKKEKKDDEKGKIKQALSTIESLRKEYPKKTVAQIIYEVELQKERPVFRNHDNYNYMIRREHINDEIATIIRKQKEFGNFENIDSEVFIVDIIAAIDDQKESTNDMSLFGKCEYYPKEHVAHQYSLLSDIFKMYQAVANITFNKEKIKITKEQIRLLTEDFLNKIKKGKSVKELKYKDVRKILKLDESVKIFNKEDSYQRAGKKVEHTITKFHFVDNLSKIDKSFIEDIFNADESYVLMREIFDVIHKEKSPKRIYEQLKSKVSSEAVIIDLIRYKKGSSLNISSYAMAKFLPYFEEGMTLDAIKEKLDLGRKEDYSVYKKGIKYLHISTYEKDDDLEINNHPVKYVVSAVLRVVKHLHAKHGTFDEIKVESTRELSLNDKVKKEIDKANKAREKEIEKIISNDEYQKIAKEYGKNIHKYARKILMWEAQERFDVYSGKSIGIDDIFSNRVDVDHIVPQSLGGLYVQHNLVLVHRDENLQKSNQLPMNYITDKEAYINRVEHLFSEHKINWKKRKNLLASNLDEIYKDTFESKDLRATSYIEALTANILKRYYPFIDEKKSVDGSAVRHIQGRATANIRKVLGVKTKSRESNIHHGVDALLIGVTNPSWLQKLSNIFRENFGKIDDEARKNIKKALPYIDGVEVKDIVKEIEQKYNSYGEDSIFYKDIWGKAKTVNFWVSKKPMISKVHKDTIYADKGNGIFTVRESIIAKFINLKITPTTFPEDFMKKFHKEILEKMYLYKTNSNDVICKIVQQRAEEIKELLWSFEFLDVKNKEEMQEAKANLESLVHRELFDNNGNVVRKVKFYQTNLTGFKVRGGLATKEKTFIGFRAFKKDKKLEYKRIDVSNFEKIKKSNDGSFKVYKNDIVFFVFDEEKYKGGKIVSFLEDKKMAAFSNPKYPANIQAQPESFLTIFKGKANSHKQVSVGKAKGIIKLKVDILGNIESYQVLGNAKSKLLDEIKSIVSH

SEQ ID NO: 3004 - protein, 1126 aa, Unknown
  Description of Unknown: uncultivated organism sequence
  Category: MG91 effectors
  Description: MG91-196 effector
MSIATKNGHIMKKILSLDLGTTSIGYSVITEKETQKYSLLDYGVSMFDKPIDADGNSKKLLHSQALSAKKLHKLRKKRKQNLAKLFEYYRLDSAVKLLKQEYENRYIHKWQLRAKKVFEEKLSIEEIFTIFYHIAKHRGYKSLDSGDLLEELCIELGIELEQKKEKKDDEKGKIKQALNTIESLRQEYPQKTVAQIIYEVELQKEQPVFRNHDNYNYMIRREYINDEIATIIRKQKEFGNFENIDSEAFISDLIAVIDDQKESTNDMSLFGKCEYYSDEYVAHQYSLLSDIFKMYQAVANITFNKEKIKITKEQIKLIAEDFLNKIKKGKSIKELKYKDVRKVLNLDDSVKIFNKEDSYQRAGKKVEHTITKFHFVDTLSKIDKSFIEDIFNADNSYALMREIFDVVHKEKSPKRIYEQLKDKVSSEAVIIDLIRYKKGSSLNISSYAMVKFLPYFEEGMTLDTIKEKLKLNRKEDYSEYKKGIKYLHISTYEKDDSLEINNHPVKYVVSAALRVVKHLHAKYGAFEEIKVESTRELSLNDKVKKEIEKANKEREKEIEKIISNKEYQKIAQEYGKNIHKYARKILMWKAQERFDIYSGKSIGLDDIFSSRVDIDHIVPQSLGGLYVQHNLVLVHRDENLQKSNQLPMNYIEDKEAYVNRVEHLFSEHKINWKKRKNLLATNLDEIYKDTFESKDLRATSYIEALTANILKRYYPFTDEKKLADGSAVRHIQGRATSNIRKVLDVKTKNRESNIHHSVDALLIGVTNHSWLQKLSNTFRENFGKIDDEARENIKKSLPYIDGAEVKDIVKEIEEKYYSFGEDSIFYKDIWGKVKTVNFWVSKKPMSSKIHKDTIYAKKGDGIFTVRESIIAKFINLKTTPTTSPEDFMKKFQKEILEKMYLYKTNPNDVICKIIKQRAEEIKELLWSFEFLDVKNKEEMQEAKVKLESLVHRELFDNNSNVIRKVKFYQTNLTGFEVRGGLATKEKTFIGFRAIKKGEKLEYERIDVSNFEKMKKSNDGSFKVYKNDIVFFIFDEENYKGGKIVSFLDDKKMAAFSNPKYPANTQSQPESFLTMFQGKPKSHKQVSIGKAKGIIKLKVDILGNIESYQVLGDARSKILDDIKKYSE

SEQ ID NO: 3005 - protein, 1144 aa, Unknown
  Description of Unknown: uncultivated organism sequence
  Category: MG91 effectors
  Description: MG91-197 effector
MVNLMSKKILSLDLGITSIGYSVLQEHSNDKYSLCDYGLSMFDKPLDKDGNSKKLLHSASISTTKLYALRKKRKQNLALVFENFQLASKTSLLEQEKNNQFINKWELRAKKVFEEKLEISELFTILYTLAKHRGYKSLDSGDLLEELCVELGIEIDNKGKKKEDDEKGKIKNALKTIESLREANPKKTVAQIIYEIEIQKVNPTFRNHDNYNYMIRREYINDEIKKIINTQEKFGLFSIAFNTKEFIKKIINAIDDQKDSTNDMSLFGRCQYYKEEIVAHQYSLLSDIFKMYESVANITFNAKPIVKITPKQLKLIADDFFKKIKKGKNIADIKYKDIRKILKLDDNVKIFNKEDSHFIKGKKQERSIIKFHFLNNLSKINNAFILDALEQENKYEILKKIFDVLAYEKAPHSIYEKLKEKIKDKKTIVDLIKYKAGSSMSISSYSMIQFIPHFEQGFTTDEIKKKLELDRKEDYSAFNKGIKYLHLKQFEEDDDLKINNHPVKYVVSATLRLIKYLHSVYGAFDEIRVESTRELSQNEQTKKDIEKANRALEKEIDAIVSNTEYQTIAQNYGKNLRKYARKILLWEEQERLDIYSGKVISVEDIFTNVVDLDHVVPRSLGGLSVKHNFVLAHRDTNVQKSNQLPLYFVMDKQAFINRVEYLFESHKINWKKKINLLANSLDDVYKDTFESKSLRATSYIEALTAQLLKRYYPFPDEKKQSDGSAVRHIQGRATSNIRKLLDVKMKVRDTNIHHAIDAILIGFTNQSWLQKLSNTFRENMGVIDDKARENIKKDFPIIELVINDEVKYVEPKELMELIEDNYNTFGEDSVFYKDIWGRVKTVNYWVSKKPMVSKIHKDTIYAKKGNGLYTNRENIINQFIALKITPTTNAEKFHENFEKKILKKMYLYKTNPKDVICQIVQNRAEDIATLLKSFIGVDSKNKELMSNAKSQLEALLHRELLDNNGNIIRKVKFYQTNLTGFDVRGGLATKEKTFIGFKSWLKDENLHYERIDVANIDTVKKENDSSFKVYKNDLVFFIYPDGSFRGGKIVSFLEENKTGAFQNSKFPMALKYQPSSFCEVDKQGKHTKTKPKSIGKAIGIIKLNLDIVGNIKSYQNIGNVNSECLEFLKENTDGWESSSSHKTL

SEQ ID NO: 3006 - protein, 510 aa, Unknown
  Description of Unknown: uncultivated organism sequence
  Category: MG91 effectors
  Description: MG91-198 effector
MFVVELPLKVEKWQSDVLNKRYELLAKIYNYAQKKLLRQYIYLTQMDEYKKCKTKKDKSVFFKNHPFYFKGITSKITFSEYDVTAFVEKIIKKNVSCDKTYKDFGINSSITEYLGKHIWSAWEKKIYDNGKKVSFKNKGELNTISIRKKSEYFGGLDADIEHMILSFNINGKKNSKAKKIILPINVKNLTEYEMYALKDGYDSINVVTIIRKMIRGKYKYYVQFTIKGEKPQKGRTLGKGNVGIDIGPSTVAISSLNGVTIDTLAEKCNNIEDKISDIERKMDRSRRATNPQNFTEDGQIKRINRKKGEIREWKYSKRYVKLRSKKQELLRKQAAIRKLQHNIKANEILSLGDTFIVENNPISAWAKRAKGVRKNKNGKIQTNKRFGKSIGNRAPSMFVTILQNKVKSLKGKFVPVNPKNAASRFDFTNGDFTEHNLDERKITLSNGNTHQRDMLAAFNLQHIDLTNDDLKKYNVDEMIEDYPIFCKLEKQEIKRFINGMKISNKSNIGI

SEQ ID NO: 3007 - protein, 795 aa, Unknown
  Description of Unknown: uncultivated organism sequence
  Category: MG91 effectors
  Description: MG91-199 effector
MEFKQKAFKELFSKGKQVTLNEFKNYLNNNGINIDEKSEISGVGKSSEMTRFNNKLSSYQVFHSVFGDKLEDKKYYDAAENIIYLGTIYADDKKTFKKAIEEKYGDFLTPDEIKRVSGLKFKDWGTLSAALFNLQGAEKSTGEVMTLIDALWNTQLNFMELINSDAFSYKEELEKYKKKGEGTIQNFKFEELNDYYFSAPVKRMIWQTVLIVREIEHVLGKPPVKMFVEVTRHDEEKEKIPPSRKDTFLSLYKNIKDESHDWKAIIEKADESGVIRSQKMYLYLSQMGRDLYTGKEIELDELFTTKYDIDHIIPQSLKKDDSILNNKVLTSKDFNNNIKQDNPLCEAIDDAHYAERKKLWDRLHNYNLINDEKYKRLTNRKGFSEEDLEGFIARQIVETSQAVLGVINIFKEIMPDTKIVFSKAKPVSDFRKDEIGWFKSRTLNDYHHAHDAYLNIVVGNVYNTKFTDNPRNFIKKERQKDLNPNYHMNKVFWYNVERGGKVAWIAGEDGTKKTVLKTLAKNSELMTRQSFEQTGGLCNQQITNKDDAGSGIGYLPVKMGEDISKYGGYAKISQSYFFLVEHTFKKKRIRTIETVPAYLKSQIESDPDALKRYCAEKLGLVDPDIRLRRINYQSLAKYNGFYVTICSKTGVRFNIANAVRLTLPKEWNNYIKKLEKTEGDEEITEEKNIELYDILTDKHLNSIFLKRPNPVGENLKNGREKFVSLSKKEQVSTLNNILLFTGFASAGKADISSIGGSKNAGAMAVSKNVNNADEFILIENSVTGIYSVRKDLKTI

SEQ ID NO: 3008 - protein, 1125 aa, Unknown
  Description of Unknown: uncultivated organism sequence
  Category: MG91 effectors
  Description: MG91-200 effector
MKKKILSLDLGITSIGYSILDEMDNDRYALIDYGVSMFDKATDKDGKSKKLLHSASKSSTKLYDLRKSRIRKLANLFEKYGLGKAVELLKQEKENRFTNKWYLRAEKSFTKCLSVNELFSILYLMAKHRGYKSLDTDDLLEELLIELGFDVEEKKEKDAEKGKIKQALKTVESFRKKYPDKTVARIIYEIEIQKENPTFRNHDNYNYMIRREYINEEIAKIVKAQNDFGLFDKSIDIELFIKELILTIDDQKDSTNDMSLFGNCEYYPEHKVAHQYSLLSDIFKMYQSVANITFGKTKISKEQIKIVADDFFKKIKQGKNIGEIKYQDIRKVLKLSDEVQIFGKEDYRLDKKGKKVHHTIIRFHFLSSLGKMDNTFIKSIFKQENKLEILKEIFDVLEFEKAPRSIYKQVNEIFVKYALVDDKKLKDETIINLIKHKSGNSLNISAHAMIQFILYFAKGMTTDEIKKELKLERNEDYSNYMKGIKYLHVKSFEKDDNLEINNHPVKYVVSATMRLVKHLHAMYGAFDEIRVESTRELSQNEETKKAIDKANKEQEKRFQEILGNDEYQKIANHYNKNLKKYARKIMLWEEQEKLDIYSGKVIGFDDIFSNKVDIDHIIPQSLGGLSVKHNLVLAHRDENIKKSNQLPMHFVANKTEYINRVEYLFKEYRINWKKKINLLAETLDERYKDTFESKELRATSYIEALTAQMLKRYYPFPDKQKQANGQAVVHVQGRATSNIRKLLGVKTKVRDTNIHHAIDAILIGLTNKSWLQKLSNTFRENMGVIDDEARANIKKEIPLIEGVEPKELVELIEDAYNVYGEDSVFYKDIFGNTKTVNFWVSKKPMSSKIHKDTIYAKKPNGFFTVREDIIKQFIALKTTVTTDSETFKKNFEKKILQKMYLFKTNSNDVICKVVQSRADEVKNLLDSFVDIDTKNKESMSEAKEKLDSLIRKELLDNNGNVIRKVKFYQSNLKGFDIRGGLAIQEKTFIGFKATLKNKKLGYERIDASNFRKIQKINDGSFKVYKNDVVFFVYEDDNFKGGKIVSFLEDKKMGSFSNPRYPASIKFQPHSFLTLFKGVPNSHKQHSLNKAIGIIKLNLDILGNIKSYSKFGEVSKEVELKIFYKE

SEQ ID NO: 3009 - protein, 523 aa, Unknown
  Description of Unknown: uncultivated organism sequence
  Category: MG91 effectors
  Description: MG91-201 effector
MKSEKKNRCMEKEMFVVELPLKVEKWQSDVLNKRYELIAKIYNYAQKKLLRQYIYLVQMDEYKKCKTKKEKSIFFKNHPFYFKDITSKITFSEYDVTAFVEKIIKKNVSSDKTYKDFGINTSITECIGKHIWSAWEKKIYGNGKKVSLKNKGELNTISIRKKSEYFGGLDIDIEHMILSFNINGKTKSKAKKIILPINVKNLTEYEMYALKDGYDSINVVTIIRKMIRGNYKYYVQFTIEGEKPQKGRTLGNGNVGIDIGPSTVAISSLNGVTIDTLAEKCDNIESKISNIERKMDRSRRATNPQNFTEDGQIKRIDRKKGEKRVWKYSKRYVKLRNKKRELLRKQTVIRKLQHNIKANEILSLGDTFIVENNPISAWAKRANGVRKNKNGKIQTNKRFGKSIGNHAPAMFVTILQNKVESLKGKFVQVDLKNAASRFDFTNGDFTEHNLDERKITLSNGNTHQRDMLAAFNLQHIDLTNDDLKKYNVDEMIEDYPIFCKLEKEEIKRFIDKMKISNKSNIGL

SEQ ID NO: 3010 - protein, 510 aa, Unknown
  Description of Unknown: uncultivated organism sequence
  Category: MG91 effectors
  Description: MG91-202 effector
MFVVELPLKVEKWQSDVLNKRYELIAKIYNYAQKKLLRQYIYLVQMDEYKKCKTKKEKSIFFKNHPFYFKDITSKITFSEYDVTAFVEKIIKKNVSSDKTYKDFGINTSITECIGKHIWSAWEKKIYGNGKKVSLKNKGELNTISIRKKSEYFGGLDIDIEHMILSFNINGKTKSKAKKIILPINVKNLTEYEMYALKDGYDSINVVTIIRKMIRGNYKYYVQFTIEGEKPQKGRTLGNGNVGIDIGPSTVAISSLNGVTIDTLAEKCDNIESKISNIERKMDRSRRATNPQNFTEDGQIKRIDRKKGEKRVWKYSKRYVKLRNKKRELLRKQTVIRKLQHNIKANEILSLGDTFIVENNPISAWAKRANGVRKNKNGKIQTNKRFGKSIGNHAPAMFVTILQNKVESLKGKFVQVDLKNAASRFDFTNGDFTEHNLDERKITLSNGNTHQRDMLAAFNLQHIDLTNDDLKKYNVDEMIEDYPIFCKLEKEEIKRFIDKMKISNKSNIGL

SEQ ID NO: 3011 - protein, 514 aa, Unknown
  Description of Unknown: uncultivated organism sequence
  Category: MG91 effectors
  Description: MG91-203 effector
MEKEMFVVELPLKVEKWQSDVLNKRYELIAKIYNYAQKKLLRQYIYLVQMDEYKKCKTKKEKSIFFKNHPFYFKDITSKITFSEYDVTAFVEKIIKKNVSSDKTYKDFGINTSITECIGKHIWSAWEKKIYGNGKKVSLKNKGELNTISIRKKSEYFGGLDIDIEHMILSFNINGKTKSKAKKIILPINVKNLTEYEMYALKDGYDSINVVTIIRKMIRGNYKYYVQFTIEGEKPQKGRTLGNGNVGIDIGPSTVAISSLNGVTIDTLAEKCDNIESKISNIERKMDRSRRATNPQNFTEDGQIKRIDRKKGEKRVWKYSKRYVKLRNKKRELLRKQTVIRKLQHNIKANEILSLGDTFIVENNPISAWAKRANGVRKNKNGKIQTNKRFGKSIGNHAPAMFVTILQNKVESLKGKFVQVDLKNAASRFDFTNGDFTEHNLDERKITLSNGNTHQRDMLAAFNLQHIDLTNDDLKKYNVDEMIEDYPIFCKLEKEEIKRFIDKMKISNKSNIGL

SEQ ID NO: 3012 - protein, 523 aa, Unknown
  Description of Unknown: uncultivated organism sequence
  Category: MG91 effectors
  Description: MG91-204 effector
MKSEKKNRCMEKEMFVVELPLKVEKWQSDVLNKRYELIAKIYNYAQKKLLRQYIYLVQMDEYKKCKTKKEKSIFFKNHPFYFKDITSKITFSEYDVTAFVEKIIKKNVSSDKTYKDFGINTSITECIGKHIWSAWEKKIYGNGKKVSLKNKGELNTISIRKKSEYFGGLDIDIEHMILSFNINGKTKSKAKKIILPINVKNLTEYEMYALKDGYDSINVVTIIRKMIRGNYKYYVQFTIEGEKPQKGRTLGNGNVGIDIGPSTVAISSLNGVTIDTLAEKCDNIESKISNIERKMDRSRRATNPQNFTEYGQIKRIDRKKGEKRVWKYSKRYVKLRNKKRELLRKQTVIRKLQHNIKANEILSLGDTFIVENNPISAWAKRANGVRKNKNGKIQTNKRFGKSIGNHAPAMFVTILQNKVESLKGKFVQVDLKNAASRFDFTNGDFTEHNLDERKITLSNGNTHQRDMLAAFNLQHIDLTNDDLKKYNVDEMIEDYPIFCKLEKEEIKRFIDKMKISNKSNIGL

SEQ ID NO: 3013 - protein, 1353 aa, Unknown
  Description of Unknown: uncultivated organism sequence
  Category: MG91 effectors
  Description: MG91-205 effector
MAVFKYYLGLDMGTNSVGWAVTDIQYNILKVKGKDLWGIREFNEASTAVERRTHRVSRRARQRKTVLIGLLKYYFHDEICKKDPYFFQRLDNSKYHLEDKDDEVKCTYNIFNDINYTDADYFKQYPTIFHLRNELIINPNEHDIRLVYLALLNMFKHRGHFLNDSLIDDGSEMKIDEAYLELANLLSEYTEYYLKTDVNITELENILSDRDESRTKKSEKIVELLEIDSKNKPYKEMIRGLCGLKFNAITIFSDVQLEDGQKLDICLSDASFEEKADDIASILGEDYFQIILSMKRLYDIGSLSEIMKGYSYLSEARVASYKKHKEDLCCLKRVIKKYCNKECYEKIFNSDEDGSYASYVGSFNSNSKQRRVGNKRSIEDLYKEIKKILKAVPQEDADVQRILTSIDNETFLPKQLTASNGVIPNQIHEKEMKKILSNAENYLPFLKEKDEKNQTVSERILMLFTFRIPYYVGPTTENSQKNGGNGWVIRKEAGQVLPWNIEEKIDMKATSEAFISRMIRRCTYISGKPVLPRASLEYQSFCVLNAINNITIDGYRISVELKQDIYNDLFLKGKKVTKKQLCKYLYLRGLITSENQVSGIDIEINNTLSTYKIFKNIFGDDIIYDRTKIMIEDIVFWCTVYGESKKFLRERLCEKYGDKLSQDQIKRILGLKFKDWGNLSKEFLELSGVNKKTNESMSIIKALWENNLNMMELINSDLFDFKEKIVEYQTDLMKTIYNIEVDDLENYYFSAPVKRMVWQTILVVKELVGVLGCEPTRIFIEMTRRHDEITKRTINRKKKFEALYKSVKDEDTDWMNVIADADDTGRIRSKKMYLYLTQKGRCMYTGKHIELSDLFNNNLYDIDHIYPRHFVKDDNIDNNLVLVCKEKNAHKRDIYPLEEQIYSSQKGMWSELKKLGFINEEKYNRLTGRNSFTDEQKAGFIARQLVETSQGTKGVANILQQLLPESKIVYAKASNVSEFRQSRDIPKSRLVNEFHHAHDAYLNIVVGNVYYVKFTQDPLKFIRNDYDKDKINNNYNLSKMFDWDVKRKGEVAWIAQKKNGDVGTIATVKKVLSKNTPLMTRYCFEGRGKISKEERHSAKKAKQVGYLPYKTSDLKIKDVTKYGGFTSITVAYYFVVEHDEKKKRIRTIESVPLYLAAKINSNHEELDKYCKNELGLVNFNIRVRKIRIGSLLKQNGYFFYITGKTGNRLIVRNAVNICFRKEWIKYSSKIEKYQEKKIIDDIITKDKNELFYDEFIKKYENSIFANRPNSILEKLKKAFPVFKESNIEQQCSILYQLLNLSKILGSECDLRLIGESPNCGKMLINKKIGDDDIYLINQSVTGLYENKINLRTV

SEQ ID NO: 3014 - protein, 1352 aa, Unknown
  Description of Unknown: uncultivated organism sequence
  Category: MG91 effectors
  Description: MG91-206 effector
MQEKPYYLGLDMGTNSVGWAVTDQHYNLLKAKGKDLWGIREFIEADTSVERRTHRISRRRRQREQARIGLLNDYFHDAIIAIDPSFFQRLENSKYHLEDKDQNVRYKYNIFNDPDYTDADYYTQYPTIYHLRKELLENPKPHDVRLVYLALLNMFKHRGHFLNSGISDGNNERSLKDAYINFAISVSELTEDYFNQDVDYSTIEGILSSRDLNRTKKAEELSTVLGIDFKNKKYKEYLRAICGLKINAYTLFSDQLPDDTTKIDLCVSDASFDEKSEELVSLIGEDLFQIILNIKEIYDIGSLAGILKGYTYLSQARVAAYDKHKHDLKLLKSSIKKYCTKEEYNNFFNSDADGSYASYIGSFNSGNKERRVGSKRTSEDLYKEIKKLLKGANKSDPAINEIFTSIETESFLPKQLTASNGIIPNQVHSKEMARILTNAENYLPFLKETDENNLSISNRILQLYKFQIPYYIGPVTEKSQRDGGNGWVIRKDNGRVFPWNIEEKIDVKATSEAFISRMVRRCTYMNGKQVLPKASLEYESFRVLNEINNLRIDGERIPVTLKQDIYTDLFQKGKKVTKKQLCNYLATRGLIESSEQVTGIDIAINNSLSTYGKFKAIFGEDIKLDHIQHMIEDIVFWCTVYGDSKQFLKEQIEDKYKGKLSPEQMKRILGFKFKDWGNLSKEFFELKGADKSTGEAVSIIRALWENNLNLMELINSPEFDFKEQLADYEANSLKTLSDFEPEDLNDYYFSAPVRRMIWQTTLIIKELVHVLGKEPARIFIEMTREKDASRGRTLSRKKKFEDLYKNVKDENTDWAKVIEHADESGTIRSKKMYLYLTQKGRCMYTGNHIELSDLFNDNLYDIDHIYPRHFVKDDNIDNNLVLVTKEKNAHKSDNYPLEAEIFNKQRNMWTQLRKEGFISEEKYNRLMGRNAFTDEQKAGFIARQLVETSQGTKGVAELFHQLLPNSKIVYAKAGNVSDFRRNREFPKSRLVNDFHHAHDAYLNIVVGNVYYVKFTQNPINYIKNSYNKDMNKNNYNLSRMFDWDVKRGDEVAWIAQKQDGAAGTISTVKKMLSKNTPLMTRLSYEGKGALANETLYSAEKAKGEGYIPFKSSDTKIQDVTKYGGFTSVTGAYFFLVEHDEKKKRIRTIESVPLYLADKIDKDSSELERYCDKLGLVNYDVRVRKIKIGSLIKYNGYFCYITGKTGYRLIVRNATNLCLASNWRKYIKKIEKYKETTIIDNVITAEENIKLYNELLNKFTVGIFGRRPNPIGEKMDSARDKFASLSIENQCLALYQILQLTAILGNESDLQLIGASTHAGKMLISKKIGTDEIYLINQSPTGLFETKIDLQTI

SEQ ID NO: 3015 - protein, 1352 aa, Unknown
  Description of Unknown: uncultivated organism sequence
  Category: MG91 effectors
  Description: MG91-207 effector
MQEKPYYLGLDMGTNSVGWAVTDQHYNLLKAKGKDLWGIREFIEADTSVERRTHRISRRRRQREQARIGLLNDYFHDAIIAIDPSFFQRLENSKYHLEDKDQNVRYKYNIFNDPDYTDADYYTQYPTIYHLRKELLENPKPHDVRLVYLALLNMFKHRGHFLNSGISDGNNERSLKDAYINFAISVSELTEDYFNQDVDYSTIEGILSSRDLNRTKKAEELSTVLGIDFKNKKYKEYLRAICGLKINAYTLFSDQLPDDTTKIDLCVSDASFDEKSEELVSLIGEDLFQIILNIKEIYDIGSLAGILKGYTYLSQARVAAYDKHKHDLKLLKSSIKKYCTKEEYNNFFNSDADGSYASYIGSFNSGNKERRVGSKRTSEDLYKEIKKLLKGANKSDPAINEIFTSIETESFLPKQLTASNGIIPNQVHSKEMARILTNAENYLPFLKETDENNLSISNRILQLYKFQIPYYIGPVTEKSQRDGGNGWVIRKDNGRVFPWNIEEKIDVKATSEAFISRMVRRCTYMNGKQVLPKASLEYESFRVLNEINNLRIDGERIPVTLKQDIYTDLFQKGKKVTKKQLCNYLATRGLIESSEQVTGIDIAINNSLSTYGKFKAIFGEDIKLDHIQHMIEDIVFWCTVYGDSKQFLKEQIEDKYKGKLSPEQMKRILGFKFKDWGNLSKEFFELKGADKSTGEAVSIIRALWENNLNLMELINSSEFDFKEQLADYEANSLKTLSDFEPEDLNDYYFSAPVRRMIWQTTLIIKELVHVLGKEPARIFIEMTREKDASRGRTLSRKKKFEDLYKNVKDENTDWAKVIEHADESGTIRSKKMYLYLTQKGRCMYTGNHIELSDLFNDNLYDIDHIYPRHFVKDDNIDNNLVLVTKEKNAHKSDNYPLEAEIFNKQRNMWTQLRKEGFISEEKYNRLMGRNAFTDEQKAGFIARQLVETSQGTKGVAELFHQLLPNSKIVYAKAGNVSDFRRNRELPKSRLVNDFHHAHDAYLNIVVGNVYYVKFTQNPINYIKNSYNKDMNKNNYNLSRMFDWDVKRGDEVAWIAQKQDGAAGTISTVKKMLSKNTPLMTRLSYEGKGALANETLYSAEKAKGEGYIPFKSSDTKIQDVTKYGGFTSVTGAYFFLVEHDEKKKRIRTIESVPLYLADKIDKDSSELERYCDKLGLVNYDVRVRKIKIGSLIKYNGYFCYITGKTGYRLIVRNATNLCLTSNWRKYIKKIEKYKETTIIDNVITAEENIKLYNELLNKFTVGIFGRRPNPIGEKMDSARDKFASLSIENQCLALYQILQLTAILGNESDLQLIGASTHAGKMLISKKIGTDEIYLINQSPTGLFETKIDLQTI

SEQ ID NO: 3016 - protein, 1352 aa, Unknown
  Description of Unknown: uncultivated organism sequence
  Category: MG91 effectors
  Description: MG91-208 effector
MLEKPYYLGLDMGTNSVGWAVTDQHYNLLKAKGKDLWGIREFTEADTSVERRTHRISRRRRQREQARIGLLNDYFHDAIIAIDPSFFQRLENSKYHLEDKDQNVRYKYNIFNDPDYTDVDYYVQYPTIYHLRKELLENPKPHDVRLVYLALLNMFKRRGHFLNAGISDGNNERSLKDAYINFAISVSELTEDYFNQDVDYSAIEEILSSRDLNRTKKAEELSTVLGIDFKNKKYKEYLRAICGLKINAYTLFSDQLPDDTTKIDLCVSDASFEEKSEELVSLIGEDLFQIILNIKEIYDIGSLTGILKGYTYLSQARVATYDKHKHDLKLLKSSIKKYCTKEEYNNFFNSDADGSYASYIGSFNSGNKKRRVGSKRTSEDLYKEIKKLLKDANKSDPAINEIFTSIETESFLPKQLTASNGIIPNQVHSKEMAKILSNAENYLPFLKDTDENNLSISNRILQLYKFQIPYYIGPVTEKSQRDGGNGWVIRKDNGRVLPWNIEEKIDVKATSETFISRMVRRCTYMNGKQVLPKASLEYESFRVLNEINNLRIDGERIPVALKQDIYTDLFQKGKKVTKKQLCNYLVTRGLIESSEQVTGIDIAINNSLSTYGKFKAILGEDIKLDHIQHMIEDIVFWCTVYGDSKQFLKEQIEDKYKEKLSPEQMKRILGFKFKDWGNLSKEFFELKGADKSTGEAISIIRALWENNLNLMELINSPEFDFKERLTDYQTNSLKTLSDFEPEDLNEYYFSAPVRRMIWQTTSIIKELVHVLGKEPARIFIEMTREKDASRGRTLSRKKKFEDLYKNVKDENTDWAKVIEHADESGTIRSKKMYLYLTQKGKCMYTGKHIELSDLFNDNLYDIDHIYPRHFVKDDNIDNNLVLVTKEKNAHKSDNYPLEAEIFNKQRNMWTQLRKEGFISEEKYNRLMGRNAFTDEQKAGFIARQLVETSQGTKGVAELFHQLLPNSKIVYAKAGNVSDFRRNRELPKSRLVNDFHHAHDAYLNIVVGNVYYVKFTQNPINYIKNSYNKDMDKNNYNLSRMFDWDVKRGDEVAWIAQKKDGTAGTISTVKKMLSKNTPLMTRLSYEGKGALANETLYSAEKAKGEGYIPFKSSDAKIQDVTKYGGFTSVTGAYFFLVEHDEKKKRIRTIESVPLYLADRIDKDSSELERYCDKLGLVNYDIRVRKIKIGSLINRNGYFAYLTGKTGKQLILRNATSLCLDKKWTIYIKKIEKYKETKVLDSIITSETTVNLYNELLNKFTVGIYGRRPNPIGEKMDSARDKFASLSIENQCLALYQILQLSAILGNESDLQLIGASTHAGKMLISRKIGTDEIYLINQSPTGLFETKIDLQTI

SEQ ID NO: 3017 - protein, 1359 aa, Unknown
  Description of Unknown: uncultivated organism sequence
  Category: MG91 effectors
  Description: MG91-209 effector
MLNTPYYLGLDMGTNSVGWAVTDKNYNLLRAKGKDLWGIREFSDSATSVDRRSYRIRRRRRQREQARIGLLKYYFNDSIIAKDPSFFQRLENSKYHLEDKDEAVKYKFNIFNDKTYTDIDYYTQYPTIYHLRKELLESSEPHDVRLVYLALLNMFKHRGHFLNAEIGDVAEERKLKDAYIDFCSCVSELTNESFNLDIDYSAVEEILSSRDISRTKKSEALASILNIDVKNKKYKEYVKAICGLKVNAYTLFSEQLSDEVKRIDICVSDASFDTKREDYISILGEDLFQIILYIKEIYDIGSLAGILKGYSYLSFARVATYEKHKSDLRKLKDCIRKYCSKEDYNQFFNSDAAGFYASYIGSFNSGKKQRRVGKNTTSEDLYKEIKKILKNADKNDPAIIDIFSSIDTESFLPKQLTASNGVIPNQVHYKEMAKILSNAESYLPFLREKNESNLSVSERILQIYKFQIPYYIGPVTEKSHRDGGNGWVIRKSNGRVLPWNINEKIDVKATSEAFISRMVRRCTYMNGAQVLPKASLEYESFRVLNEINNLRIDGERIPVDLKQAIYIDIFQKGKKITADILHKYLFNKGYIQSSEQVTGIDININNSLSTYGKFKVIFGEDIKLDSVQHMIEDIVFWCTVYGDSKKFLQEQIEEKYSDKISKEQLKRILGFKFKDWGSLSKEFFELKATDKSTGENISIIRALWENNLNLMELINSSKFNFKERLEEYRITSLKTLSDFEPEDLREYYFSAPVRKMIWQTMLVIKELVHVLGHEPERIFIEIPRDKDPSIGRTISRKKKFEELYKNVKDESVDWMNVIEHADDSGSLRSKKMYLYLTQKGRCMYTGEHIELSDLFNKSLYDIDHIYPRHFVKDDNIDNNLVLVKREKNAHKSDNYPLEAEIFNNQKKMWAQLRKEDFINEEKYKRLMGRNPFTDEQKAGFIARQLVETQQGTKGVAELLQQLLPNSKIVYTKAGNVSDFRHSREIPKSRLINDFHHAHDAYLSIVVGNVYYVKFTQNPINFIKNAYNKDSSKNNYNLTRMFDWDVKRRDEVAWIAQNKNGTVGTIAIVKKMLKRNTPLMTRLSYEGKGGLTKETLYSAEKAKGEGYIPFKSSDKKMQDVTKYGGFTSVKGAYFFLVEHDEKKKQIRTIESVPLYLADKIEKDPAELERYCQKLGLVNYNIRVRKIKIGTLIKRNGYFAYLTGKTGKQLILRNATNLCLDSKWGTYIKKIEKYKDTGVLDNTLDTDTNIKLYNELLDKFTTGIYGKRPNPIGDKMLSAKNTFTSFTLDNQCNLIYQILQLSKILGFETDLSLLHTNKKSDKPTREGGMQISKKVSNTTSMYLINQSPTGLFEKQIDLLTV

SEQ ID NO: 3018 - protein, 1352 aa, Unknown
  Description of Unknown: uncultivated organism sequence
  Category: MG91 effectors
  Description: MG91-210 effector
MQEKPYYLGLDMGTNSVGWAVTDQHYNLLKAKGKDLWGIREFIEADTSVERRTHRISRRRRQREQARIGLLNDYFHDAIIAIDPSFFQRLENSKYHLEDKDQNVRYKYNIFNDPDYTDADYYTQYPTIYHLRKELLENPKPHDVRLVYLALLNMFKHRGHFLNSGISDGNNERSLKDAYINFAISVSELTEDYFNQDVDYSTIEGILSSRDLNRTKKAEELSTVLGIDFKNKKYKEYLRAICGLKINAYTLFSDQLPDDTTKIDLCVSDASFDEKSEELVSLIGEDLFQIILNIKEIYDIGSLAGILKGYTYLSQARVAAYDKHKHDLKLLKSSIKKYCTKEEYNNFFNSDADGSYASYIGSFNSGNKERRVGSKRTSEDLYKEIKKLLKGANKSDPAINEIFTSIETESFLPKQLTASNGIIPNQVHSKEMARILTNAENYLPFLKETDENNLSISNRILQLYKFQIPYYIGPVTEKSQRDGGNGWVIRKDNGRVFPWNIEEKIDVKATSEAFISRMVRRCTYMNGKQVLPKASLEYESFRVLNEINNLRIDGERIPVTLKQDIYTDLFQKGKKVTKKQLCNYLATRGLIESSEQVTGIDITINNSLSTYGKFKAIFGEDIKLDHIQHMIEDIVFWCTVYGDSKQFLKEQIEDKYKGKLSPEQMKRILGFKFKDWGNLSKEFFELKGADKSTGEAVSIIRALWENNLNLMELINSPEFDFKEQLADYEANSLKTLSDFEPEDLNDYYFSAPVRRMIWQTTLIIKELVHVLGKEPARIFIEMTREKDASRGRTLSRKKKFEDLYKNVKDENTDWAKVIEHADESGTIRSKKMYLYLTQKGRCMYTGNHIELSDLFNDNLYDIDHIYPRHFVKDDNIDNNLVLVTKEKNAHKSDNYPLEAEIFNKQRNMWTQLRKEGFISEEKYNRLMGRNAFTDEQKAGFIARQLVETSQGTKGVAELFHQLLPNSKIVYAKAGNVSDFRRNREFPKSRLVNDFHHAHDAYLNIVVGNVYYVKFTQNPINYIKNSYNKDMNKNNYNLSRMFDWDVKRGDEVAWIAQKQDGAAGTISTVKKMLSKNTPLMTRLSYEGKGALANETLYSAEKAKGEGYIPFKSSDTKIQDVTKYGGFTSVTGAYFFLVEHDEKKKRIRTIESVPLYLADKIDKDSSELERYCDKLGLVNYDVRVRKIKIGSLIKYNGYFCYITGKTGYRLIVRNATNLCLASNWRKYIKRIEKYKETTIIDNVITAEENIKLYNELLNKFTVGIFGRRPNPIGEKMDSARDKFASLSIENQCLALYQILQLTAILGNESDLQLIGASTHAGKMLISKKIGTDEIYLINQSPTGLFETKIDLQTI

SEQ ID NO: 3019 - protein, 1359 aa, Unknown
  Description of Unknown: uncultivated organism sequence
  Category: MG91 effectors
  Description: MG91-211 effector
MLEKPYYLGLDMGTNSVGWAVTDQQYNLLKAKGKDLWGIREFAEADTSVERRTHRISRRRRQREQARIGLLNDYFHDAIIAIDPSFFQRLENSKYHLEDKDQNVRYKYNIFNDPDYTDADYYTQYPTIYHLRKELLENPKPHDVRLVYLALLNMFKHRGHFLNSGISDGNNERSLKDAYINFAISVSELTEDYFNQDVDYSTIEGILSSRDLNRTKKAEELSTVLGIDFKNKKYKEYLRAICGLKINAYTLFSDQLPDDTTKIDLCVSDASFDEKSEELVSLIGEDLFQIILNIKEIYDIGSLAGILKGYTYLSQARVAAYDKHKHDLKLLKSSIKKYCTKEEYNNFFNSDADGSYASYIGSFNSGNKERRVGSKRTSEDLYKEIKKLLKGANKSDPAINEIFTSIETESFLPKQLTASNGIIPNQVHSKEMARILTNAENYLPFLKETDENNLSISNRILQLYKFQIPYYIGPVTEKSQRDGGNGWVIRKDNGRVFPWNIEEKIDVKATSEAFISRMVRRCTYMNGKQVLPKASLEYESFRVLNEINNLRIDGERIPVTLKQDIYTDLFQKGKKVTKKQLCNYLATRGLIESSEQVTGIDIAINNSLSTYGKFKAIFGEDIKLDHIQHMIEDIVFWCTVYGDSKQFLKEQIEDKYKGKLSPEQMKRILGFKFKDWGNLSKEFFELKGADKSTGEAVSIIRALWENNLNLMELINSPEFDFKEQLADYEANSLKTLSDFEPEDLNDYYFSAPVRRMIWQTTLIIKELVHVLGKEPARIFIEMTREKDASRGRTLSRKKKFEDLYKNVKDENTDWAKVIEHADESGTIRSKKMYLYLTQKGRCMYTGNHIELSDLFNDNLYDIDHIYPRHFVKDDNIDNNLVLVTKEKNAHKSDNYPLEAEIFNKQRNMWTQLRKEGFISEEKYNRLMGRNAFTDEQKAGFIARQLVETSQGTKGVAELFHQLLPNSKIVYAKAGNVSDFRRNRELPKSRLVNDFHHAHDAYLNIVVGNVYYVKFTQNPINYIKNSYNKDMNKNNYNLSRMFDWDVKRGDEVAWIAQKQDGATGTISTVKKMLSKNTPLMTRLSYEGKGALANETLYSAEKAKGEGYIPFKSSDTKIQDVTKYGGFTSVTGAYFFLVEHDEKKKRIRTIESVPLYLADKIDKDSSELERYCDKLGLVNYDIRVRKIKIGSLLNRNGYFAYLTGKTGKQLILRNATNLCLDKKWTRYIKKIEKYKETNVLDSIITSETMVNLYNELLNKFTVGIYGRRPNPIGEKMDSAKNTFTSYTLDNQCNLIYQILQLSKILGFETDLSLLRTNKQSGKPTREGGMQISKKIDNTTSMYLINQSPTGLFETKIDLQTI

SEQ ID NO: 3020 - protein, 1352 aa, Unknown
  Description of Unknown: uncultivated organism sequence
  Category: MG91 effectors
  Description: MG91-212 effector
MQEKPYYLGLDMGTNSVGWAVTDQHYNLLKAKGKDLWGIREFIEADTSVERRTHRISRRRRQREQARIGLLNDYFHDAIIAIDPSFFQRLENSKYHLEDKDQNVRYKYNIFNDPDYTDADYYTQYPTIYHLRKELLENPKPHDVRLVYLALLNMFKHRGHFLNSGISDGNNERSLKDAYINFAISVSELTEDYFNQDVDYSTIEGILSSRDLNRTKKAEELSTVLGIDFKNKKYKEYLRAICGLKINAYTLFSDQLPDDTTKIDLCVSDASFDEKSEELVSLIGEDLFQIILNIKEIYDIGSLAGILKGYTYLSQARVAAYDKHKHDLKLLKSSIKKYCTKEEYNNFFNSDADGSYASYIGSFNSGNKERRVGSKRTSEDLYKEIKKLLKGANKSDPAINEIFTSIETESFLPKQLTASNGIIPNQVHSKEMARILTNAENYLPFLKETDENNLSISNRILQLYKFQIPYYIGPVTEKSQRDGGNGWVIRKDNGRVFPWNIEEKIDVKATSEAFISRMVRRCTYMNGKQVLPKASLEYESFRVLNEINNLRIDGERIPVTLKQDIYTDLFQKGKKVTKKQLCNYLATRGLIESSEQVTGIDIAINNSLSTYGKFKAIFGEDIKLDHIQHMIEDIVFWCTVYGDSKQFLKEQIEDKYKGKLSPEQMKRILGFKFKDWGNLSKEFFELKGADKSTGESVSIIRALWENNLNLMELINSSEFDFKEQLADYEANSLKTLSDFEPEDLNDYYFSAPVRRMIWQTTLIIKELVHVLGKEPARIFIEMTREKDASRGRTLSRKKKFEDLYKNVKDENTDWAKVIEHADESGTIRSKKMYLYLTQKGRCMYTGNHIELSDLFNDNLYDIDHIYPRHFVKDDNIDNNLVLVTKEKNAHKSDNYPLEAEIFNKQRNMWTQLRKEGFISEEKYNRLMGRNAFTDEQKAGFIARQLVETSQGTKGVAELFHQLLPNSKIVYAKAGNVSDFRRNRELPKSRLVNDFHHAHDAYLNIVVGNVYYVKFTQNPINYIKNSYNKDMNKNNYNLSRMFDWDVKRGDEVAWIAQKQDGAAGTISTVKKMLSKNTPLMTRLSYEGKGALANETLYSAEKAKGEGYIPFKSSDTKIQDVTKYGGFTSVTGAYFFLVEHDEKKKRIRTIESVPLYLADKIDKDSSELERYCDKLGLVNYDVRVRKIKIGSLIKYNGYFCYITGKTGYRLIVRNATNLCLTSNWRKYIKKIEKYKETTIIDNVITAEENIKLYNELLNKFTVGIFGRRPNPIGEKMDSARDKFASLSIENQCLALYQILQLTAILGNESDLQLIGASTHAGKMLISKKIGTDEIYLINQSPTGLFETKIDLQTI

SEQ ID NO: 3021 - protein, 1352 aa, Unknown
  Description of Unknown: uncultivated organism sequence
  Category: MG91 effectors
  Description: MG91-213 effector
MQEKPYYLGLDMGTNSVGWAVTDQHYNLLKAKGKDLWGIREFIEADTSVERRTHRISRRRRQREQARIGLLNDYFHDAIIAIDPSFFQRLENSKYHLEDKDQNVRYKYNIFNDPDYTDADYYTQYPTIYHLRKELLENPKPHDVRLVYLALLNMFKHRGHFLNSGISDGNNERSLKDAYINFAISVSELTEDYFNQDVDYSTIEGILSSRDLNRTKKAEELSTVLGIDFKNKKYKEYLRAICGLKINAYTLFSDQLPDDTTKIDLCVSDASFDEKSEELVSLIGEDLFQIILNIKEIYDIGSLAGILKGYTYLSQARVAAYDKHKHDLKLLKSSIKKYCTKEEYNNFFNSDADGSYASYIGSFNSGNKERRVGSKRTSEDLYKEIKKLLKGANKSDPAINEIFTSIETESFLPKQLTASNGIIPNQVHSKEMARILTNAENYLPFLKETDENNLSISNRILQLYKFQIPYYIGPVTEKSQRDGGNGWVIRKDNGRVFPWNIEEKIDVKATSEAFISRMVRRCTYMNGKQVLPKASLEYESFRVLNEINNLRIDGERIPVTLKQDIYTDLFQKGKKVTKKQLCNYLATRGLIESSEQVTGIDIAINNSLSTYGKFKAIFGEDIKLDHIQHMIEDIVFWCTVYGDSKQFLKEQIDDKYKGKLSPEQMKRILGFKFKDWGNLSKEFFELKGADKSTGEAVSIIRALWENNLNLMELINSSEFDFKEQLADYEANSLKTLSDFEPEDLNDYYFSAPVRRMIWQTTLIIKELVHVLGKEPARIFIEMTREKDASRGRTLSRKKKFEDLYKNVKDENTDWAKVIEHADESGTIRSKKMYLYLTQKGRCMYTGNHIELSDLFNDNLYDIDHIYPRHFVKDDNIDNNLVLVTKEKNAHKSDNYPLEAEIFNKQRNMWTQLRKEGFISEEKYNRLMGRNAFTDEQKAGFIARQLVETSQGTKGVAELFHQLLPNSKIVYAKAGNVSDFRRNRELPKSRLVNDFHHAHDAYLNIVVGNVYYVKFTQNPINYIKNSYNKDMNKNNYNLSRMFDWDVKRGDEVAWIAQKQDGAAGTISTVKKMLSKNTPLMTRLSYEGKGALANETLYSAEKAKGEGYIPFKSSDTKIQDVTKYGGFTSVTGAYFFLVEHDEKKKRIRTIESVPLYLADKIDKDSSELERYCDKLGLVNYDVRVRKIKIGSLIKYNGYFCYITGKTGYRLIVRNATNLCLTSNWRKYIKKIEKYKETTIIDNVITAEENIKLYNELLNKFTVGIFGRRPNPIGEKMDSARDKFASLSIENQCLALYQILQLTAILGNESDLQLIGASTHAGKMLISKKIGTDEIYLINQSPTGLFETKIDLQTI

SEQ ID NO: 3022 - protein, 1359 aa, Unknown
  Description of Unknown: uncultivated organism sequence
  Category: MG91 effectors
  Description: MG91-214 effector
MLEKPYYLGLDMGTNSVGWAVTDQQYNLLKAKGKDLWGIREFAEADTSVERRTHRISRRRRQREQARIGLLNDYFHDAIIAIDPSFFQRLENSKYHLEDKDQNVRYKYNIFNDPDYTDADYYTQYPTIYHLRKELLENPKPHDVRLVYLALLNMFKHRGHFLNSGISDGNNERSLKDAYINFAISVSELTEDYFNQDVDYSTIEGILSSRDLNRTKKAEELSTVLGIDFKNKKYKEYLRAICGLKINAYTLFSDQLPDDTTKIDLCVSDASFDEKSEELVSLIGEDLFQIILNIKEIYDIGSLAGILKGYTYLSQARVAAYDKHKHDLKLLKSSIKKYCTKEEYNNFFNSDADGSYASYIGSFNSGNKERRVGSKRTSEDLYKEIKKLLKGANKSDPAINEIFTSIETESFLPKQLTASNGIIPNQVHSKEMARILTNAENYLPFLKETDENNLSISNRILQLYKFQIPYYIGPVTEKSQRDGGNGWVIRKDNGRVFPWNIEEKIDVKATSEAFISRMVRRCTYMNGKQVLPKASLEYESFRVLNEINNLRIDGERIPVTLKQDIYTDLFQKGKKVTKKQLCNYLATRGLIESSEQVTGIDIAINNSLSTYGKFKAIFGEDIKLDHIQHMIEDIVFWCTVYGDSKQFLKEQIEDKYKGKLSPEQMKRILGFKFKDWGNLSKEFFELKGADKSTGEAVSIIRALWENNLNLMELINSPEFDFKEQLADYEANSLKTLSDFEPEDLNDYYFSAPVRRMIWQTTLIIKELVHVLGKEPARIFIEMTREKDASRGRTLSRKKKFEDLYKNVKDENTDWAKVIEHADESGTIRSKKMYLYLTQKGRCMYTGNHIELSDLFNDNLYDIDHIYPRHFVKDDNIDNNLVLVTKEKNAHKSDNYPLEAEIFNKQRNMWTQLRKEGFISEEKYNRLMGRNAFTDEQKAGFIARQLVETSQGTKGVAELFHQLLPNSKIVCAKAGNVSDFRRNRELPKSRLVNDFHHAHDAYLNIVVGNVYYVKFTQNPINYIKNSYNKDMNKNNYNLSRMFDWDVKRGDEVAWIAQKQDGATGTISTVKKMLSKNTPLMTRLSYEGKGALANETLYSAEKAKGEGYIPFKSSDTKIQDVTKYGGFTSVTGAYFFLVEHDEKKKRIRTIESVPLYLADKIDKDSSELERYCDKLGLVNYDIRVRKIKIGSLLNRNGYFAYLTGKTGKQLILRNATNLCLDKKWTRYIKKIEKYKETNVLDSIITSETMVNLYNELLNKFTVGIYGRRPNPIGEKMDSAKNTFTSYTLDNQCNLIYQILQLSKILGFETDLSLLRTNKQSGKPTREGGMQISKKIDNTTSMYLINQSPTGLFETKIDLQTI

SEQ ID NO: 3023 - protein, 1147 aa, Unknown
  Description of Unknown: uncultivated organism sequence
  Category: MG91 effectors
  Description: MG91-215 effector
MSRTRKAEGLAEILGVDYKNKPYKELIRGLCGLKFNACAIFPEIQSDEVPKLDICLSEASFDEKSDEIANILGEDYFEIIMAMKDIYDIGSLAGIRKGYNYLSQARVASYERHKEDLKLLKEVIKKYCSKDDYDSFFNSDADGSYASYVGSYNSKTKQRRVGNKRSSEELYKAIKKLFKNVPVEDADVQSILTSIENETFLPKQLTVSNGVIPNQVHAEEMKKILSNAENYLPFLKEKDETGLSVSEKILKLFSFQIPYYVGPTTEKSNKDGGNGWVVRKEEGQVLPWNIDEKIDMKATSEAFISRMVRRCTYISGELVLPKSSLEYQSFCVLNEINNIKIDGERISVELKQDIYKEVFQKGKRVTKKQLCKYLHTRGIIEAEEQVTGIDVTINNALTTYGKFKAILGDDISKDSVQKMIEDIVFWCTVYGDSKKFLKDRIEEKYGEKLTKEQIKRIIGFKFKDWGNLSKNFLELSGADVSTGESVSIIRALWNDNLNLMELINSRLYNYKERLAECQNTMMKTLSDIEAEDLDEYYFSAPVKRMIWQTILIIKELVKVLGCEPDRIFVEMTRRPDERKMRTESRRKKFEELYKKVKDEDVDWMKVIAHADETGSIRSKKMYLYLTQKGRCMYTGKHIELSDLFNNNLYDIDHIYPRHFVKDDNIDNNLVLVCKEKNAHKSDIYPLEDEILASQKNMWSELRRSELRRSGFITEEKYNRLIGRNPFTDEQKAGFIARQLVETSQGTKGVANILQQLLPESKIVYAKASNVSEFRNTRDIPKSRLINEFHHAHDAYLNIVVGNVYYVKFTQNPLNFIKNDYDRDKTKNNYNLSKMFDWDVERNGEVAWIAQKKDGEAGTIATVKKVLERNTPLMTRYSFEKKGRLTKEERHSAIDAKKDQYLPFKTSDSKMQDVTKYGGFNDIAGTYFFLVEHTEKKNRIRTIESVPLYIAKKIDQNPIELEKYCEQVLGLVDFDIRVRKIKIGSLIKRNNYFCYITGKKPGRLIVRNAVNLCLKNEWIKYISKLEKYNEKNVIDEMITKEKNQLLYLELINKFRNSIFSKRPNGIGKKLEDARNIFNDLSTEEQCIVLYKVLQLSAVMGYEADLSLIKYSKSAGAMQISKKIGDEDIYLINQSVTGLYEKKINLRTV

SEQ ID NO: 3024 - protein, 1359 aa, Unknown
  Description of Unknown: uncultivated organism sequence
  Category: MG91 effectors
  Description: MG91-216 effector
MIEKPYYLGLDMGTNSVGWAVTDQHYNLLKAKGKDLWGIREFTEADTSVERRTHRISRRRRQREQARIGLLNDYFHDAIIAIDPSFFQRLENSKYHLEDKDQNVRYKYNIFNDPDYTDVDYYTQYPTIYHLRKELLENPKPHDIRLVYLALLNMFKRRGHFLNAAISDGNNERSLKDAYINFAISVSELTEDYFNQDVDYSAIEEILSSRDLNRTKKAEELSTVLGIDFKNKKYKEYLRAICGLKINAYTLFSEQLPDDTTKIDICVSDASFDEKSEELVSLIGEDLFQIILNIKEIYDIGSLTGILKGYTYLSQARVAAYDKHKHDLKLLKSSIKKYCTKEEYNNFFNSDADGSYASYIGSFNSGNKERRVGSKRTSEDLYKEIKKILKDANKNDPVINEIFTSIETESFLPKQLTASNGIIPNQVHSKEMAKILANAENYLPFLKDTDENNLSISNRILQLYKFQIPYYIGPVTEKSQRDGGNGWVIRKDNGHVLPWNIEEKIDVKATSEAFISRMVRRCTYMNGKQVLPKASLEYESFRVLNEINNLRIDGERIPVALKQDIYTDLFQKGKKVTKKQLCNYLVTRGLIESSEQVTGIDIAINNSLSTYGKFKAILGEDIKLDHIQHMIEDIVFWCTVYGDSKQFLKEQIEDKYKEKLSPEQMKRILGFKFKDWGNLSKEFFELKGADKSTGEAISIIRALWENNLNLMELINSPEFDFKERLADYETNSLKTLSDFEPEDLNEYYFSAPVRRMIWQTTLIIKELVHVLGKEPARIFIEMTREKDTSRGRTLSRKKKFEDLYKNVKDENTDWAKVIEHADESGTIRSKKMYLYLTQKGRCMYTGNHIELSDLFNDNLYDIDHIYPRHFVKDDNIDNNLVLVTKEKNAHKSDNYPLEAEIFNKQRNMWTQLRKEGFISEEKYNRLMGRNAFTDEQKAGFIARQLVETSQGTKGVAELFHQLLPNSKIVYAKAGNVSDFRRNRELPKSRLVNDFHHAHDAYLNIVVGNVYYVKFTQNPINYIKNSYNKDMNKNNYNLSRMFDWDVKRGDEAAWIAQKKDGTAGTISTVKKMLSKNTPLMTRLSYEGKGALANETLYSAKKAKEEGYIPFKSSDAKIQDVTKYGGFTSVTGAYFFLVEHDEKKKRIRTIESVPLYLANKIEKDSSELERYCDKLGLVNYDIRVRKIKIGTLIKYNGYFCYITGKTGYRLIVRNATNLCLASNWTKYIKKIEKYKETTIIDNVITAEENIKLYNELLNKFTVGIFGRRPNPIGEKMDSAKNTFTSYTLDNQCNLIYQILQLSKILGFETDLSLLRTNKQFGKPTREGGMQISKKINNTTSMYLINQSPTGLFETKIDLQTI

SEQ ID NO: 3025 - protein, 1352 aa, Unknown
  Description of Unknown: uncultivated organism sequence
  Category: MG91 effectors
  Description: MG91-217 effector
MLEKPYYLGLDMGTNSVGWAVTDQHYNLLKAKGKDLWGIREFIEADTSVERRTHRISRRRRQREQARIGLLNDYFHDAIIAIDPSFFQRLENSKYHLEDKDQNVRYKYNIFNDPDYTDVDYYAQYPTIYHLRKELLENPKPHDVRLVYLALLNMFKRRGHFLNAGISDGNNERSLKDAYINFAISVSELTEDYFNQDVDYSAIEGILSSRDLNRTKKAEELSTVLGIDFKNKKYKEYLRAICGLKINAYTLFSDQLPDDTTKIDLCVSDASFDEKSEELVSLIGEDLFQIILNIKEIYDIGSLAGILKGYTYLSQARVAAYDKHKHDLKLLKSSIKKYCTKEEYNNFFNSDADGSYASYIGSFNSGNKERRVGSKRTSEDLYKEIKKLLKGANKSDPAINEIFTSIETESFLPKQLTASNGIIPNQVHSKEMARILTNAENYLPFLKETDENNLSISNRILQLYKFQIPYYIGPVTEKSQRDGGNGWVIRKDNGRVFPWNIEEKIDVKATSEAFISRMVRRCTYMNGKQVLPKASLEYESFRVLNEINNLRIDGERIPVTLKQDIYTDLFQKGKKVTKKQLCNYLATRGLIESSEQVTGIDIAINNSLSTYGKFKAIFGEDIKLDHIQHMIEDIVFWCTVYGDSKQFLKEQIEDKYKRKLSPEQMKRILGFKFKDWGNLSKEFFELKGADKSTGEAVSIIRALWENNLNLMELINSPEFDFKEQLADYEANSLKTLSDFEPEDLNDYYFSAPVRRMIWQTTLIIKELVHVLGKEPARIFIEMTREKDASRGRTLSRKKKFEDLYKNVKDENTDWAKVIEHADESGTIRSKKMYLYLTQKGRCMYTGNHIELSDLFNDNLYDIDHIYPRHFVKDDNIDNNLVLVTKEKNAHKSDNYPLEAEIFNKQRNMWTQLRKEGFISEEKYNRLMGRNAFTDEQKAGFIARQLVETSQGTKGVAELFHQLLPNSKIVYAKAGNVSDFRRNRELPKSRLVNDFHHAHDAYLNIVVGNVYYVKFTQNPINYIKNSYNKDMNKNNYNLSRMFDWDVKRGDEVAWVAQKQDAAAGTISTVKKMLSKNTPLMTRLSYEGKGALANETLYSAEKAKGEGYIPFKSSDAKIQDVTKYGGFTSVTGAYFFLVEHDEKKKRIRTIESVPLYLADKIDKDSLELERYCDKLGLVNYDVRVRKIKIGSLLNRNGYFAYLTGKTGKQLILRNATNLCLDKKWTIYIKKIEKYKETNVLDSIITSETMVNLYNELLNKFTVGIYGRRPNPIGEKMNSARDKFASLSIENQCLALYQILQLSAILGNESDLQLIGASTHAGKMLISKKIGTDEIYLINQSPTGLFETKIDLQTI

SEQ ID NO: 3026 - protein, 1359 aa, Unknown
  Description of Unknown: uncultivated organism sequence
  Category: MG91 effectors
  Description: MG91-218 effector
MLEKPYYLGLDMGTNSVGWAVTDQQYNLLKAKGKDLWGIREFAEADTSVERRTHRISRRRRQREQARIGLLNDYFHDAIIAIDPSFFQRLENSKYHLEDKDQNVRYKYNIFNDPDYTDADYYTQYPTIYHLRKELLENPKPHDVRLVYLALLNMFKHRGHFLNSGISDGNNERSLKDAYINFAISVSELTEDYFNQDVDYSTIEGILSSRDLNRTKKAEELSTVLGIDFKNKKYKEYLRAICGLKINAYTLFSDQLPDDTTKIDLCVSDASFDEKSEELVSLIGEDLFQIILNIKEIYDIGSLAGILKGYTYLSQARVAAYDKHKHDLKLLKSSIKKYCTKEEYNNFFNSDADGSYASYIGSFNSGNKERRVGSKRTSEDLYKEIKKLLKGANKSDPAINEIFTSIETESFLPKQLTASNGIIPNQVHSKEMARILTNAENYLPFLKETDENNLSISNRILQLYKFQIPYYIGPVTEKSQRDGGNGWVIRKDNGRVFPWNIEEKIDVKATSEAFISRMVRRCTYMNGKQVLPKASLEYESFRVLNEINNLRIDGERIPVTLKQDIYTDLFQKGKKVTKKQLCNYLATRGLIESSEQVTGIDIAINNSLSTYGKFKAIFGEDIKLDHIQHMIEDIVFWCTVYGDSKQFLKEQIEDKYKGKLSPEQMKRILGFKFKDWGNLSKEFFELKGADKSTGEAVSIIRALWENNLNLMELINSPEFDFKEQLADYEANSLKTLSDFEPEDLNDYYFSAPVRRMIWQTTLIIKELVHVLGKEPARIFIEMTREKDASRGRTLSRKKKFEDLYKNVKDENTDWAKVIEHADESGTIRSKKMYLYLTQKGRCMYTGNHIELSDLFNDNLYDIDHIYPRYFVKDDNIDNNLVLVTKEKNAHKSDNYPLEAEIFNKQRNMWTQLRKEGFISEEKYNRLMGRNAFTDEQKAGFIARQLVETSQGTKGVAELFHQLLPNSKIVYAKAGNVSDFRRNRELPKSRLVNDFHHAHDAYLNIVVGNVYYVKFTQNPINYIKNSYNKDMNKNNYNLSRMFDWDVKRGDEVAWIAQKQDGATGTISTVKKMLSKNTPLMTRLSYEGKGALANETLYSAEKAKGEGYIPFKSSDTKIQDVTKYGGFTSVTGAYFFLVEHDEKKKRIRTIESVPLYLADKIDKDSSELERYCDKLGLVNYDIRVRKIKIGSLLNRNGYFAYLTGKTGKQLILRNATNLCLDKKWTRYIKKIEKYKETNVLDSIITSETMVNLYNELLNKFTVGIYGRRPNPIGEKMDSAKNTFTSYTLDNQCNLIYQILQLSKILGFETDLSLLRTNKQSGKPTREGGMQISKKIDNTTSMYLINQSPTGLFETKIDLQTI

SEQ ID NO: 3027 - protein, 1358 aa, Unknown
  Description of Unknown: uncultivated organism sequence
  Category: MG91 effectors
  Description: MG91-219 effector
MEKEYYLGLDMGTNSVGWAVTDDAYNLIRFKGKDMWGIREFDEANPAVERRTHRTSRRREQRNAVRMGLIRSYFADEIQKVDSNFYQRLDNSFFHVEDKQDNVKDKNGIFNDKNYKDADYYKQYPTIFHLRKELIEDASQKDVRLVYLAVANMFKHRGHFLLSGIGSESSKQTITDLYNQVSGLITEEYGISLKTDIAGTDFEQVLCSREYSRTRKSEKVCEILEIKNSDKLKKAFVKSMCGLSVKITDVIDDTFTEISDEDKKITFSFVDSDYDEKAGVLEEKLGTDVYDIISKLKEIHDKAQVAEIMKNYQYLSFARVADYEKHKKDLKILKRVVKKYFEPTVYDKLFRSGENGTYSAYVNSFNSGEKSRRNYKERKQEDLYNSIKKLLKSIDNVCDTDIEYIKNEIEKENFLPKQLTFKNGVIPNQIHASELKAILKNAEKYLPFLNEKDESGYTVSERILMLFSFQIPYYVGPVSSNSNGWVKRLEPGQVLPWNIDKKIDLKETSEQFIQRMVRNCTYIAGEKVLPKASLLYENFKVLNEINNLSINGERIAVALKQDLYNTLFLKGKRVTRKQIFNYFHSRGLVEEDSQISGIDIAVNNSLSTYGKFLPLFGEHLKEDKYKKMVDDIVFWCTLYGDSRKFLREQLEEKYSDVLDENQIKRITGMKFKDWGNLSKEFLELLGCCKSTGEMIPLIRAMWETNYNLMELLHSEEFTYSEELEEKQGKIEKVLSEYTIDDLNEEYFSAHVKRMVWQTLLIIKEIEKIMKCPPTRIFVEMTRKDDEKGDNGRKSSRKDQLLALYKKIQSEDKEWKKEMSSRIEDYDKNGALRSKKLYLYFIQKGLDMYTGKPIDLDNLMSANSNYDIDHIYPRHFVKDDNINNNLVLASKPANAEKSDIYPIKDSIYQKMKYTWKVLRDEGLITEEKYKRLTGRNPFTDEQKAGFIARQLVETGQGTKGVADLLTALLPDTKLVYSKAGNVSDFRKRYDIPKSRLINDFHHAHDAYLNIVVGNIYFTKFTSNPLNYIRKECSSKDNKYQYNLGNMYKWDVKRDGKTAWIAAKEGETGTLATVKKMLSRNTPILTRLAIEGHGGIADATLYSHKKAKQDAYIPLKSSDARMADVTKYGGYSSVTTAYLFLVEHEIKGKKIRTLETVPLYLKDRLENSKEKLEEYCRETLGYTNPSVRMKKIKLQSLIKLNGYYMQISGKTNKQFTVRNYVQFCLNSKWVDYIHKLEKYQDKGVIDDAITDEKNVELYNVLCEKHSVGIFTLRPNPVGDKIKKGYDKFVNLTTEEQIKLLIEIIKLTCVGIVSANLTLIGGASISGKMLISKNITDAKECLLINQSVTGLYENRIDLLRV

SEQ ID NO: 3028 - protein, 1332 aa, Unknown
  Description of Unknown: uncultivated organism sequence
  Category: MG91 effectors
  Description: MG91-220 effector
MLNTPYYLGLDMGTNSVGWAVTDKNYNLLRAKGKDLWGIREFSDSATSVDRRSYRIRRRRRQREQARIGLLKYYFNDSIIAKDPSFFQRLENSKYHLEDKDEAVKYKFNIFNDKTYTDIDYYTQYPTIYHLRKELLESSEPHDVRLVYLALLNMFKHRGHFLNAEIGDVAEERKLKDAYIDFCSCVSELTNESFNLDIDYSAVEEILSSRDISRTKKSEALASILNIDVKNKKYKEYVKAICGLKVNAYTLFSEQLSDEVKRIDICVSDASFDTKREDYISILGEDLFQIILYIKEIYDIGSLAGILKGYSYLSFARVATYEKHKSDLRKLKDCIRKYCSKEDYNQFFNSDAAGFYASYIGSFNSGKKQRRVGKNTTSEDLYKEIKKILKNADKNDPAIIDIFSSIDTESFLPKQLTASNGVIPNQVHYKEMAKILSNAESYLPFLREKNESNLSVSERILQIYKFQIPYYIGPVTEKSHRDGGNGWVIRKSNGRVLPWNINEKIDVKATSEAFISRMVRRCTYMNGAQVLPKASLEYESFRVLNEINNLRIDGERIPVDLKQAIYIDIFQKGKKITADILHKYLFNKGYIQSSEQVTGIDININNSLSTYGKFKVIFGEDIKLDSVQHMIEDIVFWCTVYGDSKKFLQEQIEEKYSDKISKEQLKRILGFKFKDWGSLSKEFFELKATDKSTGENISIIRALWENNLNLMELINSSKFNFKERLEEYRITSLKTLSDFEPEDLREYYFSAPVRKMIWQTMLVIKELVHVLGHEPERIFIEIPRDKDPSIGRTISRKKKFEELYKNVKDESVDWMNVIEHADDSGSLRSKKMYLYLTQKGRCMYTGEHIELSDLFNKSLYDIDHIYPRHFVKDDNIDNNLVLVKREKNAHKSDNYPLEAEIFNNQKKMWAQLRKEDFINEEKYKRLMGRNPFTDEQKAGFIARQLVETQQGTKGVAELLQQLLPNSKIVYTKAGNVSDFRHSREIPKSRLINDFHHAHDAYLSIVVGNVYYVKFTQNPINFIKNAYNKDSSKNNYNLTRMFDWDVKRRDEVAWIAQNKNGTVGTIAIVKKMLKRNTPLMTRLSYEGKGGLTKETLYSAEKAKGEGYIPFKSSDKKMQDVTKYGGFTSVKGAYFFLVEHDEKKKQIRTIESVPLYLADKIEKDPAELERYCQKLGLVNYNIRVRKIKIGTLIKRNGYFAYLTGKTGKQLILRNATNLCLDSKWGTYIKKIEKYKDTGVLDNTLDTDTNIKLYNELLDKFTTGIYGKRPNPIGDKMLSAKNTFTSFTLDNQCNLIYQILQLSKILGFETDLSLLHTNKKSDKPTREGGMQISKK

SEQ ID NO: 3029 - protein, 1352 aa, Unknown
  Description of Unknown: uncultivated organism sequence
  Category: MG91 effectors
  Description: MG91-221 effector
MTAFKYYLGLDMGTNSVGWAATDPEYRLLKAKGKDLWGIREFNEASGAVERRTHRISRRRRQREQVRIGILKDYFHDAICEVDPGFFRRLENSKYHEEDKDVEVRYKNNIFNDRNYTDKDYFNEYPTIYHLRNELISSTEKHDVRLVFLALLNMFKHRGHFLNAGLGENNGESNIDNAYFELTELLSELTEYHLSQDIDCKQIEAILSRRDMSRTHKAEELAGVLHVDLKNKPYKELIRGLCGLKFNACVVFPDVQSEEVTKLDICLSESTFDEKSDEIANIIGEDYFEIIMAMKEMFDIGSLASIMKGHNYLSQARVASYTKHKEDLKLLKEVIKKYCGKKEYDKFFNSDADGSYASYVGSYNSKNKERRVGNKRTSEELYKEIKKLLKDAQKEDENVQKILTSIENETFLPKQLTASNGVIPNQVHAREMKKILSNAENYLPFLTEKDETGLSVSERILKLFTFQIPYYVGPTSENSGKNGGNGWVVRREDGQVLPWNIDEKIDMKATSEAFISRMVRRCTYISGEQVLPKASLEYQSYCVLNEINNIKIDGERISVELKQDIYKAVFQKGKKVTKKQLCKYLHTRGIIETEEQVTGVDVSINNALTTYGKFKPIFGEDISKDSVQKMIEDIVFWCTVYGDSKKFLKDRIEEKYGNKLSEEQIKRILGFKFKDWGNLSKKFLELNGADTSTGESISIIRALWNNNLNLMELINSSLYNYKECLAEYQNTMLKTLSEIEAEDLNEYYFSAPVRRMIWQTILVIKELVKVLGCEPERIFVEMTRKPDEHKTRTSSRRNKFEELYKKVKDETTDWMQVIANAEEDGKIRSKKMYLYLTQKGRCMYTGKHIELDDLFDNNLYDIDHIYPRHFVKDDNIDNNLVLVCKEKNAHKSDHYPIEEEIFLSQKKMWLELRKSGFITEEKYNRLMDRNPFSDEQKAGFIARQLVETSQGTKGVANILRQLLPGSKIVYAKASNVSEFRCTRDDIQKSRLVNDFHHAHDAYLNIVVGNVYYVKFTQNPLNFIKKDYDKYKEDYNLSKMFDWDVKRNGEVAWIAQRKDGAAGTITTVKRMLSRNTPLMTRYSFDGKGGLTNETLYSAKKAKGEGYIPFKSSDDKMQDVTKYGGFTSVTGAYFFLVEHTEKKKRIRTIESVPVYLAQKIEQNPDELKKYCEEILGLIDADIRLKKIKIGSLIKRNGYFCYITGKTVNRLIVRNAVNLCLKNEWIKYISKLEKVKEKDAVDKIITKEKNEVLYSELIQKFKHGIFSKRPNPVGDKLEKDSEKFNNLSIKDQCAVLCQVLRMAAILGSECDMTLLGDSPNCGKMLISKKIGDEEIYLINQSVTGLYEKKINLHTV

SEQ ID NO: 3030 - protein, 1358 aa, Unknown
  Description of Unknown: uncultivated organism sequence
  Category: MG91 effectors
  Description: MG91-222 effector
MEKEYYLGLDMGTNSVGWAVTDDAYNLIRFKGKDMWGIREFDEANPAVERRTHRTSRRREQRNAVRMGLIRSYFADEIQKVDSNFYQRLDNSFFHVEDKQDNVKDKNGIFNDKNYKDADYYKQYPTIFHLRKELIEDASQKDVRLVYLAVANMFKHRGHFLLSGIGSESSKQTITDLYNQVSGLITEEYGISLKTDIAGTDFEQVLCSREYSRTRKSEKVCEILEIKNSDKLKKAFVKSMCGLSVKITDIIDDTFTEISDEDKKITFSFVDSDYDEKAGVLEEKLGTDVYDIISKLKEIHDKAQVAEIMKNYQYLSFARVADYEKHKKDLKILKRVVKKHFEPTVYDKLFRSEENGTYSAYVNSFNSEEKSRRNYKERKQEDLYNSIKKLLKSVDNVDDTDIEYIKNEMDKENFLPKQLTFKNGVIPNQIHASELKAILKNAEKYLPFLNEKDESGYTVSERILMLFSFQIPYYVGPVSSNSNGWVKRLESGQVLPWNIDKKIDLKETSEQFIQRMVRNCTYIAGEKVLPKASLLYENFKVLNEINNLSINGERIAVALKQDLYNTLFLKGKRVTRKQIFNYFHSRGLVEEDSQISGIDIAVNNSLSTYGKFLPLFGEHLKEDKYKKMVDDIVFWCTVYGDSRKFLREQLEEKYSDVLDENQIKRITGMKFKDWGNLSKEFLELLGCCKSTGEMIPLIRAMWETNYNLMELLHSEEFTYSEELEEKQGKIEKVLSEYTIDDLNEEYFSAHVKRMVWQTLLIIKEIEKIMKCPPTRIFVEMTRKDDEKGDNGRKSSRKDQLLALYKKIQSEDKEWKKEMSSRIEDYDKNGALRSKKLYLYFIQKGLDMYTGKPIDLDNLMSANSNYDIDHIYPRHFVKDDNINNNLVLASKPANAEKSDIYPIKDSIYQKMKYTWKVLRDEGLITEEKYKRLTGRNPFTDEQKAGFIARQLVETGQGTKGVADLLTALLPDTKLVYSKAGNVSDFRKRYDIPKSRLINDFHHAHDAYLNIVVGNIYFTKFTSNPLNYIRKECSSKDNKYQYNLGNMYKWDVKRDGKTAWIAAKEGETGTLATVKKMLSRNTPILTRLAIEGHGGIADATLYSHKKAKQDAYIPLKSSDARMADVTKYGGYSSVTTAYLFLVEHEIKGKKIRTLETVPLYLKDRLENSKEKLEEYCRETLGYTNPSVRMKKIKLQSLIKLNGYYMQISGKTNKQFTVRNYVQFCLNSKWVDYIHKLEKYQDKGVIDDAITDEKNVELYNVLCEKHSVGIFTLRPNPVGDKIKKGYDKFVNLTTEEQIKLLIEIIKLTCVGIVSANLTLIGGASISGKMLISKNITDAKECLLINQSVTGLYENRIDLLRV

SEQ ID NO: 3031 - protein, 1352 aa, Unknown
  Description of Unknown: uncultivated organism sequence
  Category: MG91 effectors
  Description: MG91-223 effector
MTAFKYYLGLDMGTNSVGWAATDPEYRLLKAKGKDLWGIREFNEASGAVERRTHRISRRRKQREQVRIGILKDYFHDAICEVDPSFFQRLENSKYHEEDKDVEVRYKNNIFNDSNYTDKDYFNEYPTIYHLRNELISSTEKHDVRLVFLALLNMFKHRGHFLNAGLGENNGESNIDNAYFELTELLSELTEYHLSQDIDCKQIEAILSRRDMSRTHKAEELAGVLHVDLKNKPYKELIRGLCGLKFNACVVFPDVQSEEVTKLDICLSESTFDEKSDEIANIIGEDYFEIIMAMKEMFDIGSLASIMKGHNYLSQARVASYTKHKEDLKLLKEVIKKYCGKKEYDKFFNSDADGSYASYVGSYNSKNKERRVGNKRTSEELYKEIKKLLKDAQKEDENVQKILTSIENETFLPKQLTASNGVIPNQVHAREMKKILSNAENYLPFLTEKDETGLSVSERILKLFTFQIPYYVGPTSENSGKNGGNGWVVRREDGQVLPWNIDEKIDMKATSEAFISRMVRRCTYISGEQVLPKASLEYQSYCVLNEINNIKIDGERISVELKQDIYKAVFQKGKKVTKKQLCKYLHTRGIIETEEQVTGVDVSINNALTTYGKFKPIFGEDISKDSVQKMIEDIVFWCTVYGDSKKFLKDRIEEKYGNKLSEEQIKRILGFKFKDWGNLSKKFLELNGADTSTGESISIIRALWNNNLNLMELINSSLYNYKECLAEYQNTMLKTLSEIEAEDLNEYYFSAPVRRMIWQTILVIKELVKVLGCEPERIFVEMTRRPDEHKTRTSSRRNKFEELYKKVKDETTDWMQVIANAEEDGKIRSKKMYLYLTQKGRCMYTGKHIELDDLFDNNLYDIDHIYPRHFVKDDNIDNNLVLVCKEKNAHKSDHYPIEEEIFLSQKKMWLELRKSGFITEEKYNRLMGRSPFSDEKKAGFIARQLVETSQGTKGVANILRQLLPGSKIVYAKASNVSEFRHTRDDIPKSRLVNDFHHAHDAYLNIVVGNVYYVKFTQNPLNFIKKDYDKYKEDYNLSKMFDWDVKRNGEVAWIAQRKDGEAGTITTVKKMLSRNTPLMTRYSFEGKGGLANETLYSAKKAKGEGYIPFKSSDDKMQDVTKYGGFTKVTGAYFFLVEHTEKKKRIRTIESVPVYLAQKIEQNPDELKKYCEEILGLVDADIRLKKIKIGSLIKRNGYFCYITGKTGNRLSVRNAVNLCLKNEWIKYISKLEKVKEKDTVDEIITKEKNEVLYSELIQKFKHGIFSKRPNPVEDKLEKGSEKFSNLSIKEQCAVLCQILQLAAVLGSECDMTLLGESAHCGKMLISKKIGDEEIYLLNQSVTGLYEKKINLHTV

SEQ ID NO: 3032 - protein, 1352 aa, Unknown
  Description of Unknown: uncultivated organism sequence
  Category: MG91 effectors
  Description: MG91-224 effector
MTAFKYYLGLDMGTNSVGWAATDPEYRLLKAKGKDLWGIREFNEASGAVERRTHRISRRRRQREQVRIGILKDYFHDAICEVDPSFFQRLENSKYHEEDKDVEVRYKNNIFNDSNYTDKDYFNEYPTIYHLRNELISSTEKHDVRLVFLALLNMFKHRGHFLNAGLGENNGESNIDNVYFELTELLSELTEYHLSQDIDCKQIEAILSRRDMSRTHKAEELAGVLHVDLKNKPYKELIRGLCGLKFNACVVFPDVQSEEVTKLDICLSESTFDEKSDEIANIIGEDYFEIIMAMKEMFDIGSLASIMKGHNYLSQARVASYTKHKEDLKLLKEVIKKYCGKKEYDKFFNSDADGSYASYVGSYNSKNKERRVGNKRTSEELYKEIKKLLKDAQKEDENVQKILTSIENETFLPKQLTASNGVIPNQVHAREMKKILSNAENYLPFLTEKDETGLSVSERILKLFTFQIPYYVGPTSENSGKNGGNGWVVRREDGQVLPWNIDEKIDMKATSEAFISRMVRRCTYISGEQVLPKASLEYQSYCVLNEINNIKIDGERISVELKQDIYKAVFQKGKKVTKKQLCKYLHTRGIIETEEQVTGVDVSINNALTTYGKFKPIFGEDISKDSVQKMIEDIVFWCTVYGDSKKFLKDRIEEKYGNKLSEEQIKRILGFKFKDWGNLSKKFLELNGADTSTGESISIIRALWNNNLNLMELINSSLYNYKECLAEYQNTMLKTLSEIEAEDLNEYYFSAPVRRMIWQTILVIKELVKVLGCEPERIFVEMTRKPDEHKTRTSSRRNKFEELYKKVKDETTDWMQVIANAEEDGKIRSKKMYLYLTQKGRCMYTGKHIELDDLFDNNLYDIDHIYPRHFVKDDNIDNNLVLVCKEKNAHKSDHYPIEEEIFLSQKKMWLELRKSGFITEEKYNRLMDRNPFSDEQKAGFIARQLVETSQGTKGVANILRQLLPGSKIVYAKASNVSEFRCTRDDIQKSRLVNDFHHAHDAYLNIVVGNVYYVKFTQNPLNFIKKDYDKYKEDYNLSKMFDWDVKRNGEVAWIAQRKDGAAGTITTVKRMLSRNTPLMTRYSFDGKGGLTNETLYSAKKAKGEGYIPFKSSDDKMQDVTKYGGFTSVTGAYFFLVEHTEKKKRIRTIESVPVYLAQKIEQNPDELKKYCEEILGLIDADIRLKKIKIGSLIKRNGYFCYITGKTVNRLIVRNAVNLCLKNEWIKYISKLEKVKEKDAVDKIITKEKNEVLYSELIQKFKHGIFSKRPNPVGDKLEKDSEKFNNLSIKDQCAVLCQVLRMAAILGSECDMTLLGDSPNCGKMLISKKIGDEEIYLINQSVTGLYEKKINLHTV

SEQ ID NO: 3033 - protein, 1352 aa, Unknown
  Description of Unknown: uncultivated organism sequence
  Category: MG91 effectors
  Description: MG91-225 effector
MTAFKYYLGLDMGTNSVGWAATDPEYRLLKAKGKDLWGIREFNEASGAVERRTHRISRRRRQREQVRIGILKDYFHDAICEVDPSFFQRLENSKYHEEDKDVEVRYKNNIFNDSNYTDKDYFNEYPTIYHLRNELISSTEKHDVRLVFLALLNMFKHRGHFLNAGLGENNGESNIDNVYFELTELLSELTEYHLSQDIDCKQIEAILSRRDMSRTHKAEELAGVLHVDLKNKPYKELIRGLCGLKFNACVVFPDVQSEEVTKLDICLSESTFDEKSDEIANIIGEDYFEIIMAMKEMFDIGSLASIMKGHNYLSQARVASYTKHKEDLKLLKEVIKKYCGKKEYDKFFNSDADGSYASYVGSYNSKNKERRVGNKRTSEELYKEIKKLLKDAQKEDENVQKILTSIENETFLPKQLTASNGVIPNQVHAREMKKILSNAENYLPFLTEKDETGLSVSERILKLFTFQIPYYVGPTSENSGKNGGNGWVVRREDGQVLPWNIDEKIDMKATSEAFISRMVRRCTYISGEQVLPKASLEYQSYCVLNEINNIKIDGERISVELKQDIYKAVFQKGKKVTKKQLCKYLHTRGIIETEEQVTGVDVSINNALTTYGKFKPIFGEDISKDSVQKMIEDIVFWCTVYGDSKKFLKDRIEEKYGNKLSEEQIQRILGFKFKDWGNLSKKFLELNGADTSTGESISIIRALWNNNLNLMELINSSLYNYKECLAEYQNTMLKTLSEIEAEDLNEYYFSAPVRRMIWQTILVIKELVKVLGCEPERIFVEMTRKPDEHKTRTSSRRNKFEELYKKVKDETTDWMQVIANAEEDGKIRSKKMYLYLTQKGRCMYTGKHIELDDLFDNNLYDIDHIYPRHFVKDDNIDNNLVLVCKEKNAHKSDHYPIEEEIFLSQKKMWLELRKSGFITEEKYNRLMGRNPFSDEQKAGFIARQLVETSQGTKGVANILRQLLPGSKIVYAKASNVSEFRRTRDDIPKSRLVNDFHHAHDAYLNIVVGNVYYVKFTQNPLNFIKKDYDNYKEDYNLSKMFDWDVKRNGEVAWIAQRKDGEAGTITTVKKMLSRNTPLMTRYSFEGKGGLANETLYSAKKAKGEGYIPFKSSDDKMQDVTKYGGFTSVTGAYFFLVEHAEKKKRIRTIESVPVYLAQKIEQNPDELKKYCEEILGLIDADIRLKKIKIGSLIKRNGYFCYITGKTGKQLIVRNAVNLCLKNEWIKYISKLEKVKEKDAVDKIITKEKNEVLYSELIQKFKHGIFSKRPNPVGDKLEKGSEKFSNLSIKEQCTVLCQILQLAAVLGSECDMTLLGESAHCGKMLISKKIGDEEIYLINQSVTGLYEKKINLHTV

SEQ ID NO: 3034 - protein, 1352 aa, Unknown
  Description of Unknown: uncultivated organism sequence
  Category: MG91 effectors
  Description: MG91-226 effector
MTAFKYYLGLDMGTNSVGWAATDPEYRLLKAKGKDLWGIREFNEASGAVERRTHRISRRRRQREQVRIGILKDYFHDAICEVDPGFFRRLENSKYHEEDKDVEVRYKNNIFNDSNYTDKDYFNEYPTIYHLRNELISSTEKHDVRLVFLALLNMFKHRGHFLNAGLGENNGESNIDNAYFELTELLSELTEYHLSQDIDCKQIEAILSRRDMSRTHKAEELAGVLHVDLKNKPYKELIRGLCGLKFNACVVFPDVQSEEVTKLDICLSESTFDEKSDEIANIIGEDYFEIIMAMKEMFDIGSLASIMKGHNYLSQARVASYTKHKEDLKLLKEVIKKYCGKKEYDKFFNSDADGSYASYVGSYNSKNKERRVGNKRTSEELYKEIKKLLKDAQKEDENVQKILTSIENETFLPKQLTASNGVIPNQVHAREMKKILSNAENYLPFLTEKDETGLSVSERILKLFTFQIPYYVGPTSENSGKNGGNGWVVRREDGQVLPWNIDEKIDMKATSEAFISRMVRRCTYISGEQVLPKASLEYQSYCVLNEINNIKIDGERISVELKQDIYKAVFQKGKKVTKKQLCKYLHTRGIIETEEQVTGVDVSINNALTTYGKFKPIFGEDISKDSVQKMIEDIVFWCTVYGDSKKFLKDRIEEKYGNKLSEEQIKRILGFKFKDWGNLSKKFLELNGADTSTGESISIIRALWNNNLNLMELINSSLYNYKECLAEYQNTMLKTLSEIEAEDLNEYYFSAPVRRIIWQTILVIKELVKVLGCEPERIFVEMTRKPDEHKTRTSSRRNKFEELYKKVKDEATDWMQVIAKAEEDGKIRSKKMYLYLTQKGRCMYTGKHIELDDLFDKNLYDIDHIYPRHFVKDDNIDNNLVLVCKEKNAHKSDHYPIEEEIFLSQKKMWLELRKSGFITEEKYNRLMGRSPFSDEQKAGFIARQLVETSQGTKGVANILRQLLPGSKIVYAKASNVSEFRHTRDDIPKSRLVNDFHHAHDAYLNIVVGNVYYVKFTQNPLNFIKKDYDKYKEDYNLSKMFDWDVKRNGEVAWIAQRKDGEAGTITTVKRMLSRNTPLMTRYSFEGKGGLANETLCSAKKAKGEGYIPFKSSDDKMQDVTKYGGFTKVTGAYFFLVEHTEKKKRIRTIESVPVYLAQKIEQNPDELKKYCEEILGLVDADIRLKKIKIGSLIKRNGYFCYITGKTGNRLSVRNAVNLCLKNEWIKYISKLEKVKEKDAVDEIITKEKNEVLYSELIQKFKHGIFSKRPNPVEDKLEKGSEKFSNLSIKEQCAVLCQILQLAAVLGSECDMTLLGESAHCGKMLISKKIGDEEIYLINQSVTGLYEKKINLHTV

SEQ ID NO: 3035 - protein, 1352 aa, Unknown
  Description of Unknown: uncultivated organism sequence
  Category: MG91 effectors
  Description: MG91-227 effector
MLEKPYYLGLDMGTNSVGWAVTDQQYNLLKAKGKDLWGIREFAEADTSVERRTHRISRRRRQREQARIGLLNDYFHDAIIAIDPSFFQRLENSKYHLEDKDQNVRYKYNIFNDPDYTDADYYTQYPTIYHLRKELLENPKPHDVRLVYLALLNMFKHRGHFLNSGISDGNNERSLKDAYINFAISVSELTEDYFNQEVDYSTIEGILSSRDLNRTKKAEELSTVLGIDFKNKKYKEYLRAICGLKINAYTLFSDQLPDDTTKIDLCVSDASFDEKSEELVSLIGEDLFQIILNIKEIYDIGSLAGILKGYTYLSQARVAAYDKHKHDLKLLKSSIKKYCTKEEYNNFFNSDADGSYASYIGSFNSGNKERRVGSKRTSEDLYKEIKKLLKGANKSDPAINEIFTSIETESFLPKQLTASNGIIPNQVHSKEMARILTNAENYLPFLKETDENNLSISNRILQLYKFQIPYYIGPVTEKSQRDGGNGWVIRKDNGRVFPWNIEEKIDVKATSEAFISRMVRRCTYMNGKQVLPKASLEYESFRVLNEINNLRIDGERIPVTLKQDIYTDLFQKGKKVTKKQLCNYLATRGLIESSEQVTGIDIAINNSLSTYGKFKAILGEDIKLDHIQHMIEDIVFWCTVYGDSKQFLKEQIEDKYKGKLSPEQMKRILGFKFKDWGNLSKEFFELKGADKSTGEAVSIIRALWENNLNLMELINSPEFDFKEQLADYEANSLKTLSDFEPEDLNEYYFSAPVRRMIWQTTLIIKELVHVLGKEPARIFIEMTREKDASRGRTLSRKKKFEDLYKNVKDENTDWAKVIEHADESGTIRSKKMYLYLTQKGRCMYTGNHIELSDLFNDNLYDIDHIYPRHFVKDDNIDNNLVLVTKEKNAHKSDNYPLEAEIFNKQRNMWTQLRKEGFISEEKYNRLMGRNAFTDEQKAGFIARQLVETSQGTKGVAELFHQLLPNSKIVYAKAGNVSDFRRNRELPKSRLVNDFHHAHDAYLNIVVGNVYYVKFTQNPINYIKNSYNKDMNKNNYNLSRMFDWDVKRGDEVAWVAQKQDAAAGTISTVKKMLSKNTPLMTRLSYEGKGALANETLYSAEKAKGEGYIPFKSSDAKIQDVTKYGGFTSVTGAYFFLVEHDEKKKRIRTIESVPLYLADKIDKDSSELERYCDKLGLVNYDVRVRKIKIGSLLNRNGYFAYLTGKTGKQLILRNATNLCLDKKWTIYIKKIEKYKETNVLDSIITSETMVNLYNELLNKFTVGIYGRRPNPIGEKMNSARDKFASLSIENQCLALYQILQLSAILGNESDLQLIGASTHAGKMLISKKIGTDEIYLINQSPTGLFETKIDLQTI

SEQ ID NO: 3036 - protein, 1358 aa, Unknown
  Description of Unknown: uncultivated organism sequence
  Category: MG91 effectors
  Description: MG91-228 effector
MEKEYYLGLDMGTNSVGWAVTDDAYNLIRFKGKDMWGIREFDEANPAVERRTHRTSRRREQRNAVRMGLIRSYFADEIQKVDSNFYQRLDNSFFHVEDKQDNVKDKNGIFNDKNYKDADYYKQYPTIFHLRKELIEDASQKDVRLVYLAVANMFKHRGHFLLSGIGSESSKQTITDLYNQVSGLITEEYGISLKTDIAGTDFEQVLCSREYSRTRKSEKVCEILEIKNSDKLKKAFVKSMCGLSVKITDVIDDTFTEISDEDKKITFSFVDSDYDEKAGVLEEKLGTDVYDIISKLKEIHDKAQVAEIMKNYQYLSFARVADYEKHKKDLKILKRVVKKYFEPTVYDKLFRSGENGTYSAYVNSFNSGEKSRRNYKERKQEDLYNSIKKLLKSIDNVCDTDIEYIKNEIEKENFLPKQLTFKNGVIPNQIHASELKAILKNAEKYLPFLNEKDESGYTVSERILMLFSFQIPYYVGPVSPNSNGWVKRLEPGQVLPWNIDKKIDLKETSEQFIQRMVRNCTYIAGEKVLPKASLLYENFKVLNEINNLSINGERIAVALKQDLYNTLFLKGKRVTRKQIFNYFHSRGLVEEDSQISGIDIAVNNSLSTYGKFLPLFGEHLKEDKYKKMVDDIVFWCTVYGDSRKFLREQLEEKYSDVLDENQIKRITGMKFKDWGNLSKEFLELSGCCKSTGEMIPLIRAMWETNYNLMELLHSEEFTYSEELEEKQGKIEKVLSEYTIDDLNEEYFSAPVKRMVWQTLLIIKEIEKIMKCPPTRIFVEMTRKDDEKGDNGRKSSRKDQLLALYKKIQSEDKEWKKEMSSRIEDYDKNGALRSKKLYLYFIQKGLDMYTGKPIDLDNLMSANSNYDIDHIYPRHFVKDDNINNNLVLASKPANAEKSDIYPIKDSIYQKMKYTWKVLRDEGFITEEKYKRLTGRNPFTDEQKAGFIARQLVETGQGTKGVADLLTALLPDTKLVYSKAGNVSDFRKKYDIPKSRLINDFHHAHDAYLNIVVGNIYFTKFTSNPLNYIRKECSSKDNKYQYNLGNMYKWDVKRDGKTAWIAAKEGETGTIATVKKILSRNTPTLTRLTIEGHGGIADATLYSHKKAKQDAYIPLKSSDARMADVTKYGGYSSVTTAYLFLVEHEIKGKKIRTLETVPLYLKDRLENSKEKLEEYCRETLGYTNLSVRMKKIKLQSLIKLNGYYMQISGKTNKQFTVRNYVQFCLNSKWVDYIHKLEKYQDKGVIDDAITDEKNVELYNVLCEKHSVGIFTLRPNPVGDKIKKGYDKFVNLTTEEQIKLLIEIIKLTCVGIVSANLTLIGGAAISGKMLISKNITDAKECLLINQSVTGLYENRIDLLRV

SEQ ID NO: 3037 - protein, 1352 aa, Unknown
  Description of Unknown: uncultivated organism sequence
  Category: MG91 effectors
  Description: MG91-229 effector
MLEKPYYLGLDMGTNSVGWAVTDQQYNLLKAKGKDLWGIREFAEADTSVERRTHRISRRRRQREQARIGLLNDYFHDAIIAIDPSFFQRLENSKYHLEDKDQNVRYKYNIFNDPDYTDADYYTQYPTIYHLRKELLENPKPHDVRLVYLALLNMFKHRGHFLNSGISDGNNERSLKDAYINFAISVSELTEDYFNQDVDYSTIEGILSSRDLNRTKKAEELSTVLGIDFKNKKYKEYLRAICGLKINAYTLFSDQLPDDTTKIDLCVSDASFDEKSEELVSLIGEDLFQIILNIKEIYDIGSLAGILKGYTYLSQARVAAYDKHKHDLKLLKSSIKKYCTKEEYNNFFNSDADGSYASYIGSFNSGNKERRVGSKRTSEDLYKEIKKLLKGANKSDPAINEIFTSIETESFLPKQLTASNGIIPNQVHSKEMARILTNAENYLPFLKETDENNLSISNRILQLYKFQIPYYIGPVTEKSQRDGGNGWVIRKDNGRVFPWNIEEKIDVKATSEAFISRMVRRCTYMNGKQVLPKASLEYESFRVLNEINNLRIDGERIPVTLKQDIYTDLFQKGKKVTKKQLCNYLATRGLIESSEQVTGIDIAINNSLSTYGKFKAIFGEDIKLDHIQHMIDDIVFWCTVYGDSKQFLKEQIEDKYKGKLSPEQMKRILGFKFKDWGNLSKEFFELKGADKSTGEAVSIIRALWENNLNLMELINSPEFDFKEQLADYEANSLKTLSDFEPEDLNDYYFSAPVRRMIWQTTLIIKELVHVLGKEPARIFIEMTREKDASRGRTLSRKKKFEDLYKNVKDENTDWAKVIEHADESGTIRSKKMYLYLTQKGRCMYTGNHIELSDLFNDNLYDIDHIYPRHFVKDDNIDNNLVLVTKEKNAHKSDNYPLEAEIFNKQRNMWTQLRKEGFISEEKYNRLMGRNAFTDEQKAGFIARQLVETSQGTKGVAELFHQLLPNSKIVYAKAGNVSDFRRNREFPKSRLVNDFHHAHDAYLNIVVGNVYYVKFTQNPINYIKNSYNKDMNKNNYNLSRMFDWDVKRGDEVAWIAQKQDGAAGTISTVKKMLSKNTPLMTRLSYEGKGALANETLYSAEKAKGEGYIPFKSSDTKIQDVTKYGGFTSVTGAYFFLVEHDEKKKRIRTIESVPLYLADKIDKDSSELERYCDKLGLVNYDVRVRKIKIGSLIKYNGYFCYITGKTGYRLIVRNATNLCLASNWRKYIKKIEKYKETTIIDNVITAEENIKLYNELLNKFTVGIFGRRPNPIGEKMDSARDKFASLSIENQCLALYQILQLTAILGNESDLQLIGASTHAGKMLISKKIGTDEIYLINQSPTGLFETKIDLQTI

SEQ ID NO: 3038 - protein, 1352 aa, Unknown
  Description of Unknown: uncultivated organism sequence
  Category: MG91 effectors
  Description: MG91-230 effector
MTAFKYYLGLDMGTNSVGWAATDPEYRLLKAKGKDLWGIREFNEASGAVERRTHRISRRRRQREQVRIGILKDYFHDAICEVDPSFFQRLENSKYHEEDKDVEVRYKNNIFNDSNYTDKDYFNEYPTIYHLRNELISSTEKHDVRLVFLALLNMFKHRGHFLNAGLGENNGESNIDNAYFELTELLSELTEYHLSQDIDCKQIEAILSRRDMSRTHKAEELAGVLHVDLKNKPYKELIRGLCGLKFNACVVFPDVQSEEVTKLDICLSESTFDEKSDEIANIIGEDYFEIIMAMKEMFDIGSLASIMKGHNYLSQARVASYTKHKEDLKLLKEVIKKYCGKKEYDKFFNSDADGSYASYVGSYNSKNKERRVGNKRTSEELYKEIKKLLKDAQKEDENVQKILTSIENETFLPKQLTASNGVIPNQVHAREMKKILSNAENYLPFLTEKDETGLSVSERILKLFTFQIPYYVGPTSENSGKNGGNGWVVRREDGQVLPWNIDEKIDMKATSEAFISRMVRRCTYISGEQVLPKASLEYQSYCVLNEINNIKIDGERISVELKQDIYKAVFQKGKKVTKKQLCKYLHTRGIIETEEQVTGVDVSINNALTTYGKFKPIFGEDISKDSVQKMIEDIVFWCTVYGDSKKFLKDRIEEKYGNKLSEEQIKRILGFKFKDWGNLSKKFLELNGADTSTGESISIIRALWNNNLNLMELINSSLYNYKECLAEYQNTMLKTLSEIEAEDLNEYYFSAPVRRMIWQTILVIKELVKVLGCEPERIFVEMTRKPDEHKTRTSSRRNKFEELYKKVKDETTDWMQVIANAEEDGKIRSKKMYLYLTQKGRCMYTGKHIELDDLFDKNLYDIDHIYPRHFVKDDNIDNNLVLVCKEKNAHKSDHYPIEEEIFLSQKKMWLELRKSGFITEEKYNRLMGRSPFSDEQKAGFIARQLVETSQGTKGVANILRQLLPGSKIVYAKASNVSEFRHTRDDIPKSRLVNDFHHAHDAYLNIVVGNVYYVKFTQNPLNFIKKDYDKYKEDYNLSKMFDWDVKRNGEVAWIAQRKDGEAGTITTVKRMLSRNTPLMTRYSFEGKGGLANETLCSAKKAKGEGYIPFKSSDDKMQDVTKYGGFTKVTGAYFFLVEHTEKKKRIRTIESVPVYLAQKIEQNPDELKKYCEEILGLVDADIRLKKIKIGSLIKRNGYFCYITGKTGNRLSVRNAVNLCLKNEWIKYISKLEKVKEKDAVDEIITKEKNEVLYSELIQKFKHGIFSKRPNPVEDKLEKGSEKFSNLSIKEQCAVLCQILQLAAVLGSECDMTLLGESAHCGKMLISKKIGDEEIYLLNQSVTGLYEKKINLHTV

SEQ ID NO: 3039 - protein, 1359 aa, Unknown
  Description of Unknown: uncultivated organism sequence
  Category: MG91 effectors
  Description: MG91-231 effector
MQEKPYYLGLDMGTNSVGWAVTDQHYNLLKAKGKDLWGIREFIEADTSVERRTHRISRRRRQREQARIGLLNDYFHDAIIAIDPSFFQRLENSKYHLEDKDQNVRYKYNIFNDPDYTDADYYTQYPTIYHLRKELLENPKPHDVRLVYLALLNMFKHRGHFLNSGISDGNNERSLKDAYINFAISVSELTEDYFNQDVDYSTIEGILSSRDLNRTKKAEELSTVLGIDFKNKKYKEYLRAICGLKINAYTLFSDQLPDDTTKIDLCVSDASFDEKSEELVSLIGEDLFQIILNIKEIYDIGSLAGILKGYTYLSQARVAAYDKHKHDLKLLKSSIKKYCTKEEYNNFFNSDADGSYASYIGSFNSGNKERRVGSKRTSEDLYKEIKKLLKGANKSDPAINEIFTSIETESFLPKQLTASNGIIPNQVHSKEMARILTNAENYLPFLKETDENNLSISNRILQLYKFQIPYYIGPVTEKSQRDGGNGWVIRKDNGRVFPWNIEEKIDVKATSEAFISRMVRRCTYMNGKQVLPKASLEYESFRVLNEINNLRIDGERIPVTLKQDIYTDLFQKGKKVTKKQLCNYLATRGLIESSEQVTGIDIAINNSLSTYGKFKAIFGEDIKLDHIQHMIEDIVFWCTVYGDSKQFLKEQIEDKYKGKLSPEQMKRILGFKFKDWGNLSKEFFELKGADKSTGEAVSIIRALWENNLNLMELINSSEFDFKEQLADYEANSLKTLSDFEPEDLNDYYFSAPVRRMIWQTTLIIKELVHVLGKEPARIFIEMTREKDASRGRTLSRKKKFEDLYKNVKDENTDWAKVIEHADESGTIRSKKMYLYLTQKGRCMYTGNHIELSDLFNDNLYDIDHIYPRHFVKDDNIDNNLVLVTKEKNAHKSDNYPLEAEIFNKQRNMWTQLRKEGFISEEKYNRLMGRNAFTDEQKAGFIARQLVETSQGTKGVAELFHQLLPNSKIVYAKAGNVSDFRRNRELPKSRLVNDFHHAHDAYLNIVVGNVYYVKFTQNPINYIKNSYNKDMNKNNYNLSRMFDWDVKRGDEVAWIAQKQDGAAGTISTVKKMLSKNTPLMTRLSYEGKGALANETLYSAEKAKGEGYIPFKSSDTKIQDVTKYGGFTSVTGAYFFLVEHDEKKKRIRTIESVPLYLADKIDKDSSELERYCDKLGLVNYDVRVRKIKIGSLLNRNGYFAYLTGKTGKQLILRNATNLCLDKKWTRYIKKIEKYKETNVLDSIITSETMVNLYNELLNKFTVGIYGRRPNPIGEKMDSAKNTFTSYTLDNQCNLIYQILQLSKILGFETDLSLLRTNKQSGKPTREGGMQISKKIDNTTSMYLINQSPTGLFETKIDLQTI

SEQ ID NO: 3040 - protein, 1359 aa, Unknown
  Description of Unknown: uncultivated organism sequence
  Category: MG91 effectors
  Description: MG91-232 effector
MLEKPYYLGLDMGTNSVGWAVTDQQYNLLKAKGKDLWGIREFAEADTSVERRTHRISRRRRQREQARIGLLNDYFHDAIIAIDPSFFQRLENSKYHLEDKDQNVRYKYNIFNDPDYTDADYYTQYPTIYHLRKELLENPKPHDVRLVYLALLNMFKHRGHFLNSGISDGNNERSLKDAYINFAISVSELTEDYFNQDVDYSTIEGILSSRDLNRTKKAEELSTVLGIDFKNKKYKEYLRAICGLKINAYTLFSDQLPDDTTKIDLCVSDASFDEKSEELVSLIGEDLFQIILNIKEIYDIGSLAGILKGYTYLSQARVAAYDKHKHDLKLLKSSIKKYCTKEEYNNFFNSDADGSYASYIGSFNSGNKERRVGSKRTSEDLYKEIKKLLKGANKSDPAINEIFTSIETESFLPKQLTASNGIIPNQVHSKEMARILTNAENYLPFLKETDENNLSISNRILQLYKFQIPYYIGPVTEKSQRDGGNGWVIRKDNGRVFPWNIEEKIDVKATSEAFISRMVRRCTYMNGKQVLPKASLEYESFRVLNEINNLRIDGERIPVTLKQDIYTDLFQKGKKVTKKQLCNYLATRGLIESSEQVTGIDIAINNSLSTYGKFKAIFGEDIKLDHIQHMIEDIVFWCTVYGDSKQFLKEQIEDKYKGKLSPEQMKRILGFKFKDWGNLSKEFFELKGADKSTGEAVSIIRALWENNLNLMELINSSEFDFKEQLADYEANSLKTLSDFEPEDLNDYYFSAPVRRMIWQTTLIIKELVHVLGKEPARIFIEMTREKDASRGRTLSRKKKFEDLYKNVKDENTDWAKVIEHADESGTIRSKKMYLYLTQKGRCMYTGNHIELSDLFNDNLYDIDHIYPRHFVKDDNIDNNLVLVTKEKNAHKSDNYPLEAEIFNKQRNMWTQLRKEGFISEEKYNRLMGRNAFTDEQKAGFIARQLVETSQGTKGVAELFHQLLPNSKIVYAKAGNVSDFRRNRELPKSRLVNDFHHAHDAYLNIVVGNVYYVKFTQNPINYIKNSYNKDMNKNNYNLSRMFDWDVKRGDEVAWIAQKQDGAAGTISTVKKMLSKNTPLMTRLSYEGKGALANETLYSAEKAKGEGYIPFKSSDTKIQDVTKYGGFTSVTGAYFFLVEHDEKKKRIRTIESVPLYLADKIDKDSSELERYCDKLGLVNYDVRVRKIKIGSLLNRNGYFAYLTGKTGKQLILRNATNLCLDKKWTRYIKKIEKYKETNVLDSIITSETMVNLYNELLNKFTVGIYGRRPNPIGEKMDSAKNTFTSYTLDNQCNLIYQILQLSKILGFETDLSLLRTNKQSGKPTREGGMQISKKIDNTTSMYLINQSPTGLFETKIDLQTI

SEQ ID NO: 3041 - protein, 1352 aa, Unknown
  Description of Unknown: uncultivated organism sequence
  Category: MG91 effectors
  Description: MG91-233 effector
MTAFKYYLGLDMGTNSVGWAATDPEYRLLKAKGKDLWGIREFNEASGAVERRTHRISRRRRQREQVRIGILKDYFHDAICEVDPSFFQRLENSKYHEEDKDVEVRYKNNIFNDSNYTDKDYFNEYPTIYHLRNELISSTEKHDVRLVFLALLNMFKHRGHFLNAGLGENNGESNIDNVYFELTELLSELTEYHLSQDIDCKQIEAILSRRDMSRTHKAEELAGVLHVDLKNKPYKELIRGLCGLKFNACVVFPDVQSEEVTKLDICLSESTFDEKSDEIANIIGEDYFEIIMAMKEMFDIGSLASIMKGHNYLSQARVASYTKHKEDLKLLKEVIKKYCGKKEYDKFFNSDADGSYASYVGSYNSKNKERRVGNKRTSEELYKEIKKLLKDAQKEDENVQKILTSIENETFLPKQLTASNGVIPNQVHAREMKKILSNAENYLPFLTEKDETGLSVSERILKLFTFQIPYYVGPTSENSGKNGGNGWVVRREDGQVLPWNIDEKIDMKATSEAFISRMVRRCTYISGEQVLPKASLEYQSYCVLNEINNIKIDGERISVELKQDIYKAVFQKGKKVTKKQLCKYLHTRGIIETEEQVTGVDVSINNALTTYGKFKPIFGEDISKDSVQKMIEDIVFWCTVYGDSKKFLKDRIEEKYGNKLSEEQIKRILGFKFKDWGNLSKKFLELNGADTSTGESISIIRALWNNNLNLMELINSSLYNYKECLAEYQNTMLKTLSEIEAEDLNEYYFSAPVRRIIWQTILVIKELVKVLGCEPERIFVEMTRKPDEHKTRTSSRRNKFEELYKKVKDEATDWMQVIAKAEEDGKIRSKKMYLYLTQKGRCMYTGKHIELDDLFDKNLYDIDHIYPRHFVKDDNIDNNLVLVCKEKNAHKSDHYPIEEEIFLSQKKMWLELRKSGFITEEKYNRLMGRSPFSDEQKAGFIARQLVETSQGTKGVANILRQLLPGSKIVYAKASNVSEFRHTRDDIPKSRLVNDFHHAHDAYLNIVVGNVYYVKFTQNPLNFIKKDYDKYKEDYNLSKMFDWDVKRNGEVAWIAQRKDGEAGTITTVKRMLSRNTPLMTRYSFEGKGGLANETLCSAKKAKGEGYIPFKSSDDKMQDVTKYGGFTKVTGAYFFLVEHTEKKKRIRTIESVPVYLAQKIEQNPDELKKYCEEILGLVDADIRLKKIKIGSLIKRNGYFCYITGKTGNRLSVRNAVNLCLKNEWIKYISKLEKVKEKDAVDEIITKEKNEVLYSELIQKFKHGIFSKRPNPVEDKLEKGSEKFSNLSIKEQCAVLCQILQLAAVLGSECDMTLLGESAHCGKMLISKKIGDEEIYLLNQSVTGLYEKKINLHTV

SEQ ID NO: 3042 - protein, 1359 aa, Unknown
  Description of Unknown: uncultivated organism sequence
  Category: MG91 effectors
  Description: MG91-234 effector
MLEKPYYLGLDMGTNSVGWAVTDQQYNLLKAKGKDLWGIREFAEADTSVERRTHRISRRRRQREQARIGLLNDYFHDAIIAIDPSFFQRLENSKYHLEDKDQNVRYKYNIFNDPDYTDADYYTQYPTIYHLRKELLENPKPHDVRLVYLALLNMFKHRGHFLNSGISDGNNERSLKDAYINFAISVSELTEDYFNQDVDYSTIEGILSSRDLNRTKKAEELSTVLGIDFKNKKYKEYLRAICGLKINAYTLFSDQLPDDTTKIDLCVSDASFDEKSEELVSLIGEDLFQIILNIKEIYDIGSLAGILKGYTYLSQARVAAYDKHKHDLKLLKSSIKKYCTKEEYNNFFNSDADGSYASYIGSFNSGNKERRVGSKRTSEDLYKEIKKLLKGANKSDPAINEIFTSIETESFLPKQLTASNGIIPNQVHSKEMARILTNAENYLPFLKETDENNLSISNRILQLYKFQIPYYIGPVTEKSQRDGGNGWVIRKDNGRVFPWNIEEKIDVKATSEAFISRMVRRCTYMNGKQVLPKASLEYESFRVLNEINNLRIDGERIPVTLKQDIYTDLFQKGKKVTKKQLCNYLATRGLIESSEQVTGIDIAINNSLSTYGKFKAIFGEDIKLDHIQHMIEDIVFWCTVYGDSKQFLKEQIEDKYKGKLSPEQMKRILGFKFKDWGNLSKEFFELKGADKSTGEAVSIIRALWENNLNLMELINSPEFDFKEQLADYEANSLKTLSDFEPEDLNDYYFSAPVRRMIWQTTLIIKELVHVLGKEPARIFIEMTREKDASRGRTLSRKKKFEDLYKNVKDENTDWAKVIEHADESGTIRSKKMYLYLTQKGRCMYTGNHIELSDLFNDNLYDIDHIYPRHFVKDDNIDNNLVLVTKEKNAHKSDNYPLEAEIFNKQRNMWTQLRKEGFISEEKYNRLMGRNAFTDEQKAGFIARQLVETSQGTKGVAELFHQLLPNSKIVYAKAGNVSDFRRNRELPKSRLVNDFHHAHDAYLNIVVGNVYYVKFTQNPINYIKNSYNKDMNKNNYNLSRMFDWDVKREDEVAWIAQKQDGATGTISTVKKMLSKNTPLMTRLSYEGKGALANETLYSAEKAKGEGYIPFKSSDTKIQDVTKYGGFTSVTGAYFFLVEHDEKKKRIRTIESVPLYLADKIDKDSSELERYCDKLGLVNYDIRVRKIKIGSLLNRNGYFAYLTGKTGKQLILRNATNLCLDKKWTRYIKKIEKYKETNVLDSIITSETMVNLYNELLNKFTVGIYGRRPNPIGEKMDSAKNTFTSYTLDNQCNLIYQILQLSKILGFETDLSLLRTNKQSGKPTREGGMQISKKIDNTTSMYLINQSPTGLFETKIDLQTI

SEQ ID NO: 3043 - protein, 1352 aa, Unknown
  Description of Unknown: uncultivated organism sequence
  Category: MG91 effectors
  Description: MG91-235 effector
MTAFKYYLGLDMGTNSVGWAATDPEYRLLKAKGKDLWGIREFNEASGAVERRTHRISRRRRQREQVRIGILKDYFHDAICEVDPSFFRRLENSKYHEEDKDVEVRYKNNIFNDGNYTDKDYFNEYPTIYHLRNELISSTEKHDVRLVFLALLNMFKHRGHFLNAGLGENNGESNIDNAYFELTELLSELTEYHLSQDIDCKQIEAILSRRDMSRTHKAEELAGVLHVDLKNKPYKELIRGLCGLKFNACVVFPDVQSEEVTKLDICLSESSFDEKSDEIANIIGEDYFEIIMAMKEMFDIGSLASIMKGHNYLSQARVASYTKHKEDLKLLKEVIKKYCGKKEYDKFFNSDADGSYASYVGSYNSKNKERRVGNKRTSEELYKEIKKLLKDAPKEDENVQKILTSIENETFLPKQLTASNGVIPNQVHAREMKKILSNAENYLPFLTEKDETGLSVSERILKLFTFQIPYYVGPTSENSGKNGGNGWVVRREDGQVLPWNIDEKIDMKATSEAFISRMVRRCTYISGEQVLPKASLEYQSYCVLNEINNIKIDGERISVELKQDIYKAVFQKGKKVTKKQLCKYLHTRGIIETEEQVTGVDVSINNALTTYGKFKPIFGEDISKDSVQKMIEDIVFWCTVYGDSKKFLKDRIEEKYGNKLSEEQIKRILGFKFKDWGNLSKKFLELNGADTSTGESISIIRALWNNNLNLMELINSSLYNYKECLAEYQNTMLKTLSEIEAEDLNEYYFSAPVRRIIWQTILVIKELVKVLGCEPERIFVEMTRKPDEHKTRTSSRRNKFEELYKKVKDEATDWMQVIAKAEEDGKIRSKKMYLYLTQKGRCMYTGKHIELDDLFDKNLYDIDHIYPRHFVKDDNIDNNLVLVCKEKNAHKSDHYPIEEEIFLSQKKMWLELRKSGFITEEKYNRLMGRSPFSDEQKAGFIARQLVETSQGTKGVANILRQLLPGSKIVYAKASNVSEFRHTRDDIPKSRLVNDFHHAHDAYLNIVVGNVYYVKFTQNPLNFIKKDYDKYKEDYNLSKMFDWDVKRNGEVAWIAQRKDGEAGTITTVKKMLSRNTPLMTRYSFEGKGGLANETLYSAKKAKGEGYIPFKSSDDKMQDVTKYGGFTKVTGAYFFLVEHTEKKKRIRTIESVPVYFVQKIEKNPGELKKYCEEILGLVDADIRLKKIKIGSLIKRNGYFCYITGKTGNRLSVRNAVNLCLKNEWIKYISKLEKVKEKDTIDEIITKEKNEVLYSELIQKFKHCIFSKRPNPVGDKLEKGSEKFSNLSIKDQCAVLCQVLRMAAILGSECDMTLLGESSICGEMKISKKIGDEEIYLINQSVTGLYEKKINLHTV

SEQ ID NO: 3044 - protein, 1358 aa, Unknown
  Description of Unknown: uncultivated organism sequence
  Category: MG91 effectors
  Description: MG91-236 effector
MEKEYYLGLDMGTNSVGWAVTDDAYNLIRFKGKDMWGIREFDEANPAVERRTHRTSRRREQRNAVRMGLIRSYFADEIQKVDSNFYQRLDNSFFHVEDKQDNVKDKNGIFNDKNYKDADYYKQYPTIFHLRKELIEDASQKDVRLVYLAVANMFKHRGHFLLSGIGSESSKQTITDLYNQVSGLITEEYGISLKTDIAGTDFEQVLCSREYSRTRKSEKVCEILEIKNSDKLKKAFVKSMCGLSVKITDVIDDTFTEISDEDKKITFSFVDSDYDEKAGVLEEKLGTDVYDIISKLKEIHDKAQVAEIMKNYQYLSFARVADYEKHKKDLKILKRVVKKYFEPTVYDKLFRSGENGTYSAYVNSFNSGEKSRRNYKERKQEDLYNSIKKLIKSIDNVCDTDIEYIKNEIEKENFLPKQLTFKNGVIPNQIHASELKAILKNAEKYLPFLNEKDESGYTVSERILMLFSFQIPYYVGPVSSNSNGWVKRLEPGQVLPWNIDKKIDLKETSEQFIQRMVRNCTYIAGEKVLPKASLLYENFKVLNEINNLSINGERIAVALKQDLYNTLFLKGKRVTRKQIFNYFHSRGLVEEDSQISGIDIAVNNSLSTYGKFLPLFGEHLKEDKYKKMVDDIVFWCTVYGDSRKFLREQLEEKYSDVIDENQIKRITGMKFKDWGNLSKEFLELSGCCKSTGEMIPLIRAMWETNYNLMELLHSEEFTYSEELEEKQGKIEKVLSEYTIDDLNEEYFSAPVKRMVWQTLLIIKEIEKIMKCPPTRIFVEMTRKDDEKGDNGRKSSRKDQLLALYKKIQSEDKEWKKEMSSRIEDYDKNGALRSKKLYLYFIQKGLDMYTGKPIDLDNLMSANSNYDIDHIYPRHFVKDDNINNNLVLASKPANAEKSDIYPIKDSIYQKMKYTWKVLRDEGLITEEKYKRLTGRNPFTDEQKAGFIARQLVETGQGTKGVADLLTALLPDTKLVYSKAGNVSDFRKRYDIPKSRLINDFHHAHDAYLNIVVGNIYFTKFTSNPLNYIRKECSSKDNKYQYNLGNMYKWDVKRDGKTAWIAAKEGETGTIATVKKILSRNTPTLTRLTIEGHGGIADATLYSHKKAKQDAYIPLKSSDARMADVTKYGGYSSVTTAYLFLVEHEIKGKKIRTLETVPLYLKDRLENSKEKLEEYCRESLGYTNPSVRMKKIKLQSLIKLNGYYMQISGKSIKQFEVRNYVQICLNGKWVDYIHKLEKYQDKGVIDNAITDEKNVELYNILCEKHSVGIFTLRPNPVGDKIKKGYDKFVNLTTEEQIKLLIEIIKLTCVGIVKADLRLIGASEKSGTMKINKNITDAKECFLINQSVTGLYENRIDLLRV

SEQ ID NO: 3045 - protein, 1353 aa, Unknown
  Description of Unknown: uncultivated organism sequence
  Category: MG91 effectors
  Description: MG91-237 effector
MAVFKYYLGLDMGTNSVGWAVTDIQYNILKVKGKDLWGIREFNEASTAVERRTHRVSRRARQRKTVLIGLLKYYFHDEICKKDPYFFQRLDNSKYHLEDKDDEVKYTYNIFNDINYTDADYFKQYPTIFHLRNELIFNPNEHDIRLVYLALLNMFKHRGHFLNDSLIDDDSEMKIDEAYLELANLLSEYTEYYLKTDVNITELENILSDRDESRTKKSEKIVELLEIDSKNKPYKEMIRGLCGLKFNAITIFSDVQLEDGQKLDICLSDASFEEKADEIASILGEDYFQIILSMKRLYDIGSLSEIMKGYSYLSEARVASYKKHKEDLCCLKRVIKKYCNKECYEKIFNSDEDGSYASYVGSFNSNSKQRRVGNKRSIEDLYKEIKKILKAVPQEDADVQRILTSIDNETFLPKQLTASNGVIPNQIHEKEMKKILSNAENYLPFLKEKDEKNQTVSERILMLFTFRIPYYVGPTTENSQKNGGNGWVIRKEAGQVLPWNIEEKIDMKATSEAFISRMIRRCTYISGKPVLPRASLEYQSFCVLNAINNITIDGYRISVELKQDIYNDLFLKGKKVTKKQLCKYLYLRGLITSENQVSGIDIEINNTLSTYKIFKNIFGDDIIYDSTKIMIEDIVFWCTVYGESKKFLRERLCEKYGDKLSQDQIKRILGLKFKDWGNLSKEFLELSGVNKKTNESMSIIKALWENNLNMMELINSDLFDFKEKIVEYQTDLMKTIYNIEVDDLENYYFSAPVKRMVWQTILVVKELVGVLGCEPTRIFIEMTRRHDEITKRTINRKKKFEALYKSVKDEDTDWMNVIADADDTGRIRSKKMYLYLTQKGRCMYTGKHIELSDLFNNNLYDIDHIYPRHFVKDDNIDNNLVLVCKEKNAHKRDIYPLEEQIYSSQKEMWSELKKLGFINEEKYNRLTGRNSFTDEQKAGFIARQLVETSQGTKGVANILQQLLPESKIVYAKASNVSEFRQSRDIPKSRLVNEFHHAHDAYLNIVVGNVYYVKFTQDPLKFIKNDYDKDKINNNYNLSKMFDWDVKRKGEVAWIAQKKNGDVGTIATVKKVLSKNTPLMTRYCFEGRGKISKEERHSAKEAKQVGYLPYKTSDLKIKDVTKYGGFTSITVAYYFVVEHDEKKKRIRTIESVPLYLAAKINSNHEELDKYCKNELGLVNFNIRVRKIRIGSLLKRNGYFFYITGKTGNRLIVRNAVNICFRKEWIKYSSKIEKYQEKKIIDDIITKDKNELFYDEFIKKYENSIFANRPNSILEKLKKAFPVFKESNIEQQCSILYQLLNLSKILGSECDLRLIGESPNCGKMLINKKIGDDDIYLINQSVTGVYENKINLRTV

SEQ ID NO: 3046 - protein, 1352 aa, Unknown
  Description of Unknown: uncultivated organism sequence
  Category: MG91 effectors
  Description: MG91-238 effector
MQEKPYYLGLDMGTNSVGWAVTDQHYNLLKAKGKDLWGIREFIEADTSVERRTHRISRRRRQREQARIGLLNDYFHDAIIAIDPSFFQRLENSKYHLEDKDQNVRYKYNIFNDPDYTDADYYTQYPTIYHLRKELLENPKPHDVRLVYLALLNMFKHRGHFLNSGISDGNNERSLKDAYINFAISVSELTEDYFNQDVDYSTIEGILSSRDLNRTKKAEELSTVLGIDFKNKKYKEYLRAICGLKINAYTLFSDQLPDDTTKIDLCVSDASFDEKSEELVSLIGEDLFQIILNIKEIYDIGSLAGILKGYTYLSQARVAAYDKHKHDLKLLKSSIKKYCTKEEYNNFFNSDADGSYASYIGSFNSGNKERRVGSKRTSEDLYKEIKKLLKGANKSDPAINEIFTSIETESFLPKQLTASNGIIPNQVHSKEMARILTNAENYLPFLKETDENNLSISNRILQLYKFQIPYYIGPVTEKSQRDGGNGWVIRKDNGRVFPWNIEEKIDVKATSEAFISRMVRRCTYMNGKQVLPKASLEYESFRVLNEINNLRIDGERIPVTLKQDIYTDLFQKGKKVTKKQLCNYLATRGLIESSEQVTGIDIAINNSLSTYGKFKAIFGEDIKLDHIQHMIEDIVFWCTVYGDSKQFLKEQIEDKYKGKLSPEQMKRILGFKFKDWGNLSKEFFELKGADKSTGEAVSIIRALWENNLNLMELINSSEFDFKEQLADYEANSLKTLSDFEPEDLNDYYFSAPVRRMIWQTTLIIKELVHVLGKEPARIFIEMTREKDASRGRTLSRKKKFEDLYKNVKDENTDWAKVIEHADESGTIRSKKMYLYLTQKGRCMYTGNHIELSDLFNDNLYDIDHIYPRHFVKDDNIDNNLVLVTKEKNAHKSDNYPLEAEIFNKQRNMWTQLRKEGFISEEKYNRLMGKNAFTDEQKAGFIARQLVETSQGTKGVAELFHQLLPNSKIVYAKAGNVSDFRRNRELPKSRLVNDFHHAHDAYLNIVVGNVYYVKFTQNPINYIKNSYNTDMNKNNYNLSRMFDWDVKRGDEVAWIAQKQDGAAGTISTVKKMLSKNTPLMTRLSYEGKGALANETLYSAEKAKGEGYIPFKSSDTKIQDVTKYGGFTSVTGAYFFLVEHDEKKKRIRTIESVPLYLADKIDKDSSELERYCDKLGLVNYDVRVRKIKIGSLIKYNGYFCYITGKTGYRLIVRNATNLCLTSNWRKYIKKIEKYKETTIIDNVITAEENIKLYNELLNKFTVGIFGRRPNPIGEKMDSARDKFASLSIENQCLALYQILQLTAILGNESDLQLIGASTHAGKMLISKKIGTDEIYLINQSPTGLFETKIDLQTI

SEQ ID NO: 3047 - protein, 1358 aa, Unknown
  Description of Unknown: uncultivated organism sequence
  Category: MG91 effectors
  Description: MG91-239 effector
MEKEYYLGLDMGTNSVGWAVTDDAYNLIRFKGKDMWGIREFDEANPAVERRTHRTSRRREQRNAVRMGLIRSYFADEIQKVDSNFYQRLDNSFFHVEDKQDNVKDKNGIFNDKNYKDADYYKQYPTIFHLRKELIEDASQKDVRLVYLAVANMFKHRGHFLLSGIGSESSKQTITDLYNQVSGLITEEYGISLKTDIAGTDFEQVLCSREYSRTRKSEKVCEILEIKNSDKLKKAFVKSMCGLSVKITDIIDDTFTEISDEDKKITFSFVDSDYDEKAGVLEEKLGTDVYDIISKLKEIHDKAQVAEIMKNYQYLSFARVADYEKHKKDLKILKRIVKKYFEPTIYDKLFRSEENGTYSAYVNSFNSEEKSRRNYKVRKQEDLYNSIKKLLKSVDNVYDTDIEYIKNEMDKENFLPKQLTFKNGVIPNQIHASELKAILKNAEKYLPFLNEKDESGYTVSERILMLFSFQIPYYVGPVSPNSNGWVKRLEPGQVLPWNIDKKIDLKETSEQFIQRMVRNCTYIAGEKVLPKASLLYENFKVLNEINNLSISGERIAVALKQDLYNTLFLKGKRVTRKQIFNYFHSRGLVEEDSQISGIDIAVNNSLSTYGKFLPLFGDHLKEDKYKKMVDDIVFWCTVYGDSRKFLREQLEEKYSDVLDENQIKRITGMKFKDWGNLSKEFLELSGCCKSTGEVMPLIRAMWETNYNLMELLHSEEFTYSEELEEKQGKIEKVLSEYTIDDLNEEYFSAPVKRMVWQTLLIIKEIEKIMKCPPTRIFVEMTRKDDEKGDNGRKSSRKDQLLALYKKIQSEDKEWKKEMSSRIEDYDKNGALRSKKLYLYFIQKGLDMYTGKPIDLDNLMSANSNYDIDHIYPRHFVKDDNINNNLVLASKPANAEKSDIYPIKDSIYQKMKYTWKVLRDEGLITEEKYKRLTGRNPFTDEQKAGFIARQLVETGQGTKGVADLLTALLPDTKLVYSKAGNVSDFRKKYDIPKSRLINDFHHAHDAYLNIVVGNIYFTKFTSNPLNYIRKECSSKDNKYQYNLGNMYKWDVKRDGKTAWIAAKEGETGTIATVKKMLSRNTPTLTRLTIEGHGGIADATLYSHKKAKQDAYIPLKSSDARMADVTKYGGYSSVTTAYLFLVEHEIKGKKIRTLETVPLYLKDRLENSKEKLEEYCGETLGYTNPSVRMKKIKLQSLIKLNGYYMQISGKTNKQFTVRNYVQFCLNSKWVDYIHKLEKYQDKGVIDDAITDEKNVELYNVLCEKHSVGIFTLRPNPVGDKIKKGYDKFVNLTTEEQIKLLIEIIKLTCVGIVSANLTLIGGASISGKMLISKNITDAKECLLINQSVTGLYENRIDLLRV

SEQ ID NO: 3048 - protein, 1358 aa, Unknown
  Description of Unknown: uncultivated organism sequence
  Category: MG91 effectors
  Description: MG91-240 effector
MEKEYYLGLDMGTNSVGWAVTDDAYNLIRFKGKDMWGIREFDEANPAVERRTHRTSRRREQRNAVRMGLIRSYFADEIQKVDSNFYQRLDNSFFHVEDKQDNVKDKNGIFNDKNYKDADYYKQYPTIFHLRKELIEDASQKDVRLVYLAVANMFKHRGHFLLSGIGSESSKQTITDLYNQVTGLITEEYGISLKTDIAGTDFEQVLCSREYSRTRKSEKVCEILEIKNSDKLKKAFVKSMCGLSVKITDIIDDTFTEISDEDKKITFSFVDSDYDEKAGVLEEKLGTDVYDIISKLKEIHDKAQVAEIMKNYQYLSFARVADYEKHKKDLKILKRVVKKYFEPTVYDKLFRSEENGTYSAYVNSFNSGEKSRRNYKERKQEDLYNSIKKLLKSIDNVCDTDIEYIKNEMDKENFLPKQLTFKNGVIPNQIHASELKAILKNAEKYLPFLNEKDESGYTVSERILMLFSFQIPYYVGPVSSNSNGWVKRLEPGQVLPWNIDKKIDLKETSEQFIQRMVRNCTYIAGEKVLPKASLLYENFKVLNEINNLSINGERITVNLKQDLYNTLFLKGKRVTRKQIFNYFHSRGLVEEDSQISGIDIAVNNSLSTYGKFLPLFGEHLKEDKYKKMVDDIVFWCTVYGDSRKFLREQLEEKYSDVLDENQIKRITGMKFKDWGNLSKEFLELSGCCKSTGEVMPLIRAMWETNYNLMELLHSEEFTYSEELEEKQGKIEKVLSEYTIDDLNEEYFSAPVKRMIWQTLLIIKEIEKIMKCPPTRIFVEMTRKDDEKGDNGRKSSRKDQLLALYKKIQSEDKEWKKEMSSRIEDYDKNGALRSKKLYLYFIQKGLDMYTGKPIDLDNLMSANSNYDIDHIYPRHFVKDDNINNNLVLASKPANAEKSDIYPIKDSIYQKMKYTWKVLRDEGLITEEKYKRLTGRNPFTDEQKAGFIARQLVETGQGTKGVADLLTALLPDTKLVYSKAGNVSDFRKRYDIPKSRLINDFHHAHDAYLNIVVGNIYFTKFTSNPLNYIRKECSSKDNKYQYNLGNMYKWDVKRDGKTAWVAPEEGETGTLATVKKMLSRNTPILTRLTIEGHGGIADATLYSHKKAKQDTYIPLKSSDARMADVTKYGGYSSVTTAYLFLVEHEIKGKKIRTLETVPLYLKDRLENSKEKLEEYCRETLGYTNPSVRMKKIKLQSLIKLNGYYMQISGKTNKQFTVRNYVQFCLNSKWVDYIHKLEKYQDKGVIDDAITDEKNVELYNVLCEKHSVGIFTLRPNPVGDKIKKGYDKFVNLTTEEQIKLLIEIIKLTCVGIVSANLTLIGGASISGKMLISKNITDAKECLLINQSVTGLYENRIDLLRV

SEQ ID NO: 3049 - protein, 1352 aa, Unknown
  Description of Unknown: uncultivated organism sequence
  Category: MG91 effectors
  Description: MG91-241 effector
MLEKPYYLGLDMGTNSVGWAVTDQQYNLLKAKGKDLWGIREFAEADTSVERRTHRISRRRRQREQARIGLLNDYFHDAIIAIDPSFFQRLENSKYHLEDKDQNVRYKYNIFNDPDYTDADYYTQYPTIYHLRKELLENPKPHDVRLVYLALLNMFKHRGHFLNSGISDGNNERSLKDAYINFAISVSELTEDYFNQDVDYSTIEGILSSRDLNRTKKAEELSTVLGIDFKNKKYKEYLRAICGLKINAYTLFSDQLPDDTTKIDLCVSDASFDEKSEELVSLIGEDLFQIILNIKEIYDIGSLAGILKGYTYLSQARVAAYDKHKHDLKLLKSSIKKYCTKEEYNNFFNSDADGSYASYIGSFNSGNKERRVGSKRTSEDLYKEIKKLLKGANKSDPAINEIFTSIETESFLPKQLTASNGIIPNQVHSKEMARILTNAENYLPFLKETDENNLSISNRILQLYKFQIPYYIGPVTEKSQRDGGNGWVIRKDNGRVFPWNIEEKIDVKATSEAFISRMVRRCTYMNGKQVLPKASLEYESFRVLNEINNLRIDGERIPVTLKQDIYTDLFQKGKKVTKKQLCNYLATRGLIESSEQVTGIDIAINNSLSTYGKFKAIFGEDIKLDHIQHMIEDIVFWCTVYGDSKQFLKEQIEDKYKGKLSPEQMKRILGFKFKDWGNLSKEFFELKGADKSTGEAVSIIRALWENNLNLMELINSPEFDFKEQLADYEANSLKTLSDFEPEDLNDYYFSAPVRRMIWQTTLIIKELVHVLGKEPARIFIEMTREKDASRGRTLSRKKKFEDLYKNVKDENTDWAKVIEHADESGTIRSKKMYLYLTQKGRCMYTGNHIELSDLFNDNLYDIDHIYPRHFVKDDNIDNNLVLVTKEKNAHKSDNYPLEAEIFNKQRNMWTQLRKEGFISEEKYNRLMGRNAFTDEQKAGFIARQLVETSQGTKGVAELFHQLLPNSKIVYAKAGNVSDFRRNRELPKSRLVNDFHHAHDAYLNIVVGNVYYVKFTQNPINYIKNSYNKDMNKNNYNLSRMFDWDVKRGDEVAWIAQKQDGATGTISTVKKMLSKNTPLMTRLSYEGKGALANETLYSAEKAKGEGYIPFKSSDTKIQDVTKYGGFTSVTGAYFFLVEHDEKKKRIRTIESVPLYLADKIDKDSSELERYCDKLGLVNYDVRVRKIKIGSLIKYNGYFCYITGKTGYRLIVRNATNLCLASNWRKYIKKIEKYKETTIIDNVITAEENIKLYNELLNKFTVGIFGRRPNPIGEKMDSARDKFASLSIENQCLALYQILQLTAILGNESDLQLIGASTHAGKMLISKKIGTDEIYLINQSPTGLFETKIDLQTI

SEQ ID NO: 3050 - protein, 1352 aa, Unknown
  Description of Unknown: uncultivated organism sequence
  Category: MG91 effectors
  Description: MG91-242 effector
MTAFKYYLGLDMGTNSVGWAATDPEYRLLKAKGKDLWGIREFNEASGAVERRTHRISRRRRQREQVRIGILKDYFHDAICEVDPGFFQRLENSKYHEEDKDVEVRYKNNIFNDSNYTDKDYFNEYPTIYHLRNELISSTEKHDVRLVFLALLNMFKHRGHFLNAGLGENNGESNIDNAYFELTELLSELTEYHLSQDIDCKQIEAILSRRDMSRTHKAEELAGVLHVDLKNKPYKELIRGLCGLKFNACVVFPDVQSEEVTKLDICLSESTFDEKSDEIANIIGEDYFEIIMAMKEMFDIGSLASIMKGHNYLSQARVASYTKHKEDLKLLKEVIKKYCGKKEYDKFFNSDADGSYASYVGSYNSKNKERRVGNKRTSEELYKEIKKLLKDAQKEDENVQKILTSIENETFLPKQLTASNGVIPNQVHAREMKKILSNAENYLPFLTEKDETGLSVSERILKLFTFQIPYYVGPTSENSGKNGGNGWVVRREDGQVLPWNIDEKIDMKATSEAFISRMVRRCTYISGEQVLPKASLEYQSYCVLNEINNIKIDGERISVELKQDIYKAVFQKGKKVTKKQLCKYLHTRGIIETEEQVTGVDVSINNALTTYGKFKPIFGEDISKDSVQKMIEDIVFWCTVYGDSKKFLKDRIEEKYGNKLSEEQIKRILGFKFKDWGNLSKKFLELNGADTSTGESISIIRALWNNNLNLMELINSSLYNYKECLAEYQNTMLKTLSEIEAEDLNEYYFSAPVRRMIWQTIHVIKELVKVLGCEPERIFVEMTRKPDEHKTRTSSRRNKFEELYKKVKDETTDWMQVIANAEEDGKIRSKKMYLYLTQKGRCMYTGKHIELDDLFDNNLYDIDHIYPRHFVKDDNIDNNLVLVCKEKNAHKSDHYPIEEEIFLSQKKMWLELRKSGFITEEKYNRLMDRNPFSDEQKAGFIARQLVETSQGTKGVANILRQLLPGSKIVYAKASNVSEFRCTRDDIQKSRLVNDFHHAHDAYLNIVVGNVYYVKFTQNPLNFIKKDYDKYKEDYNLSKMFDWDVKRNGEVAWIAQRKDGAAGTITTVKRMLSRNTPLMTRYSFDGKGGLTNETLYSAKKAKGEGYIPFKSSDDKMQDVTKYGGFTSVTGAYFFLVEHTEKKKRIRTIESVPVYLAQKIEQNPDELKKYCEEILGLIDADIRLKKIKIGSLIKRNGYFCYITGKTVNRLIVRNAVNLCLKNEWIKYISKLEKVKEKDAVDKIITKEKNEVLYSELIQKFKHGIFSKRPNPVGDKLEKDSEKFNNLSIKDQCAVLCQVLRMAAILGSECDMTLLGDSPNCGKMLISKKIGDEEIYLINQSVTGLYEKKINLHTV

SEQ ID NO: 3051 - protein, 1358 aa, Unknown
  Description of Unknown: uncultivated organism sequence
  Category: MG91 effectors
  Description: MG91-243 effector
MEKEYYLGLDMGTNSVGWAVTDDAYNLIRFKGKDMWGIREFDEANPAVERRTHRTSRRREQRNAVRMGLIRSYFADEIQKVDSNFYQRLDNSFFHVEDKQDNVKDKNGIFNDKNYKDADYYKQYPTIFHLRKELIEDASQKDVRLVYLAVANMFKHRGHFLLSGIGSESSKQTITDLYNQVSGLITEEYGISLKTDIAGTDFEQVLCSREYSRTRKSEKVCEILEIKNSDKLKKAFVKSMCGLSVKITDVIDDTFTEISDEDKKITFSFVDSDYDEKAGVLEEKLGTDVYDIISKLKEIHDKAQVAEIMKNYQYLSFARVADYEKHKKDLKILKRVVKKYFEPTVYDKLFRSGENGTYSAYVNSFNSGEKSRRNYKERKQEDLYNSIKKLLKSIDNVCDTDIEYIKNEIEKENFLPKQLTFKNGVIPNQIHASELKAILKNAEKYLPFLNEKDESGYTVSERILMLFSFQIPYYVGPVSPNSNGWVKRLEPGQVLPWNIDKKIDLKETSEQFIQRMVRNCTYIAGEKVLPKASLLYENFKVLNEINNLSINGERIAVALKQDLYNTLFLKGKRVTRKQIFNYFHSRGLVEEDSQISGIDIAVNNSLSTYGKFLPLFGEHLKEDKYKKMVDDIVFWCTVYGDSRKFLREQLEEKYSDVLDENQIKRITGMKFKDWGNLSKEFLELLGCCKSTGEMIPLIRAMWETNYNLMELLHSEEFTYSEELEEKQGKIEKVLSEYTIDDLNEEYFSAPVKRMVWQTLLIIKEIEKIMKCPPTRIFVEMTRKDDEKGDNGRKSSRKDQLLALYKKIQSEDKEWKKEMSSRIEDYDKNGALRSKKLYLYFIQKGLDMYTGKPIDLDNLMSANSNYDIDHIYPRHFVKDDNINNNLVLASKPANAEKSDIYPIKDSIYQKMKYTWKVLRDEGLITEEKYKRLTGRNPFTDEQKAGFIARQLVETGQGTKGVADLLTALLPDTKLVYSKAGNVSDFRKRYDIPKSRLINDFHHAHDAYLNIVVGNIYFTKFTSNPLNYIRKECSSKDNKYQYNLGNMYKWDVKRDGKTAWIAAKEGETGTIATVKKILSRNTPTLTRLTIEGHGGIADATLYSHKKAKQDAYIPLKSSDARMADVTKYGGYSSVTTAYLFLVEHEIKGKKIRTLETVPLYLKDRLENSKEKLEEYCRETLGYTNPSVRMKKIKLQSLIKLNGYYMQISGKTNKQFTVRNYVQFCLNSKWVDYIHKLEKYQDKGVIDDAITDEKNVELYNVLCEKHSVGIFTLRPNPVGDKIKKGYDKFVNLTTEEQIKLLIEIIKLTCVGIVSANLTLIGGAAISGKMLISKNITDAKECLLINQSVTGLYENRIDLLRV

SEQ ID NO: 3052 - protein, 1352 aa, Unknown
  Description of Unknown: uncultivated organism sequence
  Category: MG91 effectors
  Description: MG91-244 effector
MTAFKYYLGLDMGTNSVGWAATDPEYRLLKAKGKDLWGIREFNEASGAVERRTHRISRRRRQREQVRIGILKDYFHDAICEVDPSFFQRLENSKYHEEDKDVEVRYKNNIFNDSNYTDKDYFNEYPTIYHLRNELISSTEKHDVRLVFLALLNMFKHRGHFLNAGLGENNGESNIDNAYFELTELLSELTEYHLSQDIDCKQIEAILSRRDMSRTHKAEELAGVLHVDLKNKPYKELIRGLCGLKFNACVVFPDVQSEEVTKLDICLSESTFDEKSDEIANIIGEDYFEIIMAMKEMFDIGSLASIMKGHNYLSQARVASYTKHKEDLKLLKEVIKKYCGKKEYDKFFNSDADGSYASYVGSYNSKNKERRVGNKRTSEELYKEIKKLLKDAQKEDENVQKILTSIENETFLPKQLTASNGVIPNQVHAREMKKILSNAENYLPFLTEKDETGLSVSERILKLFTFQIPYYVGPTSENSGKNGGNGWVVRREDGQVLPWNIDEKIDMKATSEAFISRMVRRCTYISGEQVLPKASLEYQSYCVLNEINNIKIDGERISVELKQDIYKAVFQKGKKVTKKQLCKYLHTRGIIETEEQVTGVDVSINNALTTYGKFKPIFGEDISKDSVQKMIEDIVFWCTVYGDSKKFLKDRIEEKYGNKLSEEQIKRILGFKFKDWGNLSKKFLELNGADTSTGESISIIRALWNNNLNLMELINSSLYNYKECLAEYQNTMLKTLSEIEAEDLNEYYFSAPVRRMIWQTILVIKELVKVLGCEPERIFVEMTRKPDEHKTRTSSRRNKFEELYKKVKDETTDWMQVIANAEEDGKIRSKKMYLYLTQKGRCMYTGKHIELDDLFDNNLYDIDHIYPRHFVKDDNIDNNLVLVCKEKNAHKSDHYPIEEEIFLSQKKMWLELRKSGFITEEKYNRLMDRNPFSDEQKAGFIARQLVETSQGTKGVANILRQLLPGSKIVYAKASNVSEFRCTRDDIQKSRLVNDFHHAHDAYLNIVVGNVYYVKFTQNPLNFIKKDYDKYKEDYNLSKMFDWDVKRNGEVAWIAQRKDGAAGTITTVKRMLSRNTPLMTRYSFDGKGGLTNETLYSAKKAKGEGYIPFKSSDDKMQDVTKYGGFTSVTGAYFFLVEHTEKKKRIRTIESVPVYLAQKIEQNPDELKKYCEEILGLIDADIRLKKIKIGSLIKRNGYFCYITGKTVNRLIVRNAVNLCLKNEWIKYISKLEKVKEKDAVDKIITKEKNEVLYSELIQKFKHGIFSKRPNPVGDKLEKDSEKFNNLSIKDQCAVLCQVLRMAAILGSECDMTLLGDSPNCGKMLISKKIGDEEIYLINQSVTGLYEKKINLHTV

SEQ ID NO: 3053 - protein, 1352 aa, Unknown
  Description of Unknown: uncultivated organism sequence
  Category: MG91 effectors
  Description: MG91-245 effector
MTAFKYYLGLDMGTNSVGWAATDPEYRLLKAKGKDLWGIREFNEASGAVERRTHRISRRRRQREQVRIGILKDYFHDAICEVDPSFFRRLENSKYHEEDKDVEVRYKNNIFNDGNYTDKDYFNEYPTIYHLRNELISSTEKHDVRLVFLALLNMFKHRGHFLNAGLGENNGESNIDNAYFELTELLSELTEYHLSQDIDCKQIEAILSRRDMSRTHKAEELAGVLHVDLKNKPYKELIRGLCGLKFNACVVFPDVQSEEVTKLDICLSESSFDEKSDEIANIIGEDYFEIIMAMKEMFDIGSLASIMKGHNYLSQARVASYTKHKEDLKLLKEVIKKYCGKKEYDKFFNSDADGSYASYVGSYNSKNKERRVGNKRTSEELYKEIKKLLKDAPKEDENVQKILTSIENETFLPKQLTASNGVIPNQVHAREMKKILSNAENYLPFLTEKDETGLSVSERILKLFTFQIPYYVGPTSENSGKNGGNGWVVRREDGQVLPWNIDEKIDMKATSEAFISRMVRRCTYISGEQVLPKASLEYQSYCVLNEINNIKIDGERISVELKQDIYKAVFQKGKKVTKKQLCKYLHTRGIIETEEQVTGVDVSINNALTTYGKFKPIFGEDISKDSVQKMIEDIVFWCTVYGDSKKFLKDRIEEKYGNKLSEEQIKRILGFKFKDWGNLSKKFLELNGADTSTGESISIIRALWNNNLNLMELINSSLYNYKECLAEYQNTMLKTLSEIEAEDLNEYYFSAPVRRIIWQTILVIKELVKVLGCEPERIFVEMTRKPDEHKTRTSSRRNKFEELYKKVKDEATDWMQVIAKAEEDGKIRSKKMYLYLTQKGRCMYTGKHIELDDLFDKNLYDIDHIYPRHFVKDDNIDNNLVLVCKEKNAHKSDHYPIEEEIFLSQKKMWLELRKSGFITEEKYNRLMGRSPFSDEQKAGFIARQLVETSQGTKGVANILRQLLPGSKIVYAKASNVSEFRHTRDDIPKSRLVNDFHHAHDAYLNIVVGNVYYVKFTQNPLNFIKKDYDKYKEDYNLSKMFDWDVKRNGEVAWIAQRKDGEAGTITTVKRMLSRNTPLMTRYSFEGKGGLANETLCSAKKAKGEGYIPFKSSDDKMQDVTKYGGFTKVTGAYFFLVEHTEKKKRIRTIESVPVYLAQKIEQNPDELKKYCEEILGLVDADIRLKKIKIGSLIKRNGYFCYITGKTGNRLSVRNAVNLCLKNEWIKYISKLEKVKEKDAVDEIITKEKNEVLYSELIQKFKHGIFSKRPNPVEDKLEKGSEKFSNLSIKEQCAVLCQILQLAAVLGSECDMTLLGESAHCGKMLISKKIGDEEIYLLNQSVTGLYEKKINLHTV

SEQ ID NO: 3054 - protein, 1352 aa, Unknown
  Description of Unknown: uncultivated organism sequence
  Category: MG91 effectors
  Description: MG91-246 effector
MTAFKYYLGLDMGTNSVGWAATDPGYRLLKAKGKDLWGIREFNEASGAVERRTHRISRRRRQREQVRIGILKDYFHDAICEVDPGFFQRLENSKYHEEDKDVEVRYKNNIFNDSNYTDKDYFNEYPTIYHLRNELISSTEKHDVRLVFLALLNMFKHRGHFLNAGLGENNGESNIDNAYFELTELLSELTEYHLSQDIDCKQIEAILSRRDMSRTHKAEELAGVLHVDLKNKPYKELIRGLCGLKFNACVVFPDVQSEEVTKLDICLSESTFDEKSDEIANIIGEDYFEIIMAMKEMFDIGSLASIMKGHNYLSQARVASYTKHKEDLKLLKEVIKKYCSKKEYDKFFNSDADGSYASYVGSYNSKNKERRVGNKRTSEELYKEIKKLLKDAQKEDENVQKILTSIENETFLPKQLTASNGVIPNQVHAREMKKILSNAENYLPFLTEKDETGLSVSERILKLFTFQIPYYVGPTSENSGKNGGNGWVVRREDGQVLPWNIDEKIDMKATSEAFISRMVRRCTYISGEQVLPKASLEYQSYCVLNEINNIKIDGERISVELKQDIYKAVFQKGKKVTKKQLCKYLHTRGIIETEEQVTGVDVSINNALTTYGKFKPIFGEDISKDSVQKMIEDIVFWCTVYGDSKKFLKDRIEEKYGNKLSEEQIKRILGFKFKDWGNLSKKFLELNGADTSTGESISIIRALWNNNLNLMELINSSLYNYKECLAEYQNTMLKTLSEIEAEDLNEYYFSAPVRRMIWQTILVIKELVKVLGCEPERIFVEMTRRPDEHKTRTSSRRNKFEELYKKVKDETTDWMQVIANAEEDGKIRSKKMYLYLTQKGRCMYTGKHIELDDLFDNNLYDIDHIYPRHFVKDDNIDNNLVLVCKEKNAHKSDHYPIEEEIFLSQKKMWLELRKSGFITEEKYNRLMGRSPFSDEQKAGFIARQLVETSQGTKGVANILRQLLPGSKIVYAKASNVSEFRCTRDDIQKSRLVNDFHHAHDAYLNIVVGNVYYVKFTQNPLNFIKKDYDKYKEDYNLSKMFDWDVKRNGEVAWIAQRKDGAAGTITTVKRMLSRNTPLMTRYSFDGKGGLTNETLYSAKKAKGEGYIPFKSSDDKMQDVTKYGGFTSVTGAYFFLVEHTEKKKRIRTIELVPVYLAQKIEQNPDELKKYCEEILGLIDADIRLKKIKIGSLIKRNGYFCYITGKTGNRLIVRNAVNLCLKNEWIKYISKLEKVKEKDAVDKIITKEKNEVLYSELIQKFKHGIFSKRPNPVGDKLEKDSEKFNNLSIKDQCAVLCQVLRMAAILGSECDMTLLGDSPNCGKMLISKKIGDEEIYLINQSVTGLYEKKINLHTV

SEQ ID NO: 3055 - protein, 1352 aa, Unknown
  Description of Unknown: uncultivated organism sequence
  Category: MG91 effectors
  Description: MG91-247 effector
MTAFKYYLGLDMGTNSVGWAATDPEYRLLKAKGKDLWGIREFNEASGAVERRTHRISRRRRQREQVRIGILKDYFHDAICEVDPSFFRRLENSKYHEEDKDVEVRYKNNIFNDGNYTDKDYFNEYPTIYHLRNELISSTEKHDVRLVFLALLNMFKHRGHFLNAGLGENNGESNIDNAYFELTELLSELTEYHLSQDIDCKQIEAILSRRDMSRTHKAEELAGVLHVDLKNKPYKELIRGLCGLKFNACVVFPDVQSEEVTKLDICLSESSFDEKSDEIANIIGEDYFEIIMAMKEMFDIGSLASIMKGHNYLSQARVASYTKHKEDLKLLKEVIKKYCGKKEYDKFFNSDADGSYASYVGSYNSKNKERRVGNKRTSEELYKEIKKLLKDAPKEDENVQKILTSIENETFLPKQLTASNGVIPNQVHAREMKKILSNAENYLPFLTEKDETGLSVSERILKLFTFQIPYYVGPTSENSGKNGGNGWVVRREDGQVLPWNIDEKIDMKATSEAFISRMVRRCTYISGEQVLPKASLEYQSYCVLNEINNIKIDGERISVELKQDIYKAVFQKGKKVTKKQLCKYLHTRGIIETEEQVTGVDVSINNALTTYGKFKPIFGEDISKDSVQKMIEDIVFWCTVYGDSKKFLKDRIEEKYGNKLSEEQIKRILGFKFKDWGNLSKKFLELNGADTSTGESISIIRALWNNNLNLMELINSSLYNYKECLAEYQNTMLKTLSEIEAEDLNDYYFSAPVRRIIWQTILVIKELVKVLGCEPERIFVEMTRKPDEHKTRTSSRRNKFEELYKKVKDEATDWMQVIAKAEEDGKIRSKKMYLYLTQKGRCMYTGKHIELDDLFDKNLYDIDHIYPRHFVKDDNIDNNLVLVCKEKNAHKSDHYPIEEEIFLSQKKMWLELRKSGFITEEKYNRLMGRSPFSDEQKAGFIARQLVETSQGTKGVANILRQLLPGSKIVYAKASNVSEFRHTRDDIPKSRLVNDFHHAHDAYLNIVVGNVYYVKFTQNPLNFIKKDYDKYKEDYNLSKMFDWDVKRNGEVAWIAQRKDGEAGTITTVKRMLSRNTPLMTRYSFEGKGGLANETLCSAKKAKGEGYIPFKSSDDKMQDVTKYGGFTKVTGAYFFLVEHTEKKKRIRTIESVPVYLAQKIEQNPDELKKYCEEILGLVDADIRLKKIKIGSLIKRNGYFCYITGKTGNRLSVRNAVNLCLKNEWIKYISKLEKVKEKDAVDEIITKEKNEVLYSELIQKFKHGIFSKRPNPVEDKLEKGSEKFSNLSIKEQCAVLCQILQLAAVLGSECDMTLLGESAHCGKMLISKKIGDEEIYLLNQSVTGLYEKKINLHTV

SEQ ID NO: 3056 - protein, 1352 aa, Unknown
  Description of Unknown: uncultivated organism sequence
  Category: MG91 effectors
  Description: MG91-248 effector
MTAFKYYLGLDMGTNSVGWAATDPEYRLLKAKGKDLWGIREFNEASGAVERRTHRISRRRRQREQVRIGILKDYFHDAICEVDPSFFRRLENSKYHEEDKDVEVRYKNNIFNDGNYTDKDYFNEYPTIYHLRNELISSTEKHDVRLVFLALLNMFKHRGHFLNAGLGENNGESNIDNAYFELTELLSELTEYHLSQDIDCKQIEAILSRRDMSRTHKAEELAGVLHVDLKNKPYKELIRGLCGLKFNACVVFPDVQSEEVTKLDICLSESSFDEKSDEIANIIGEDYFEIIMAMKEMFDIGSLASIMKGHNYLSQARVASYTKHKEDLKLLKEVIKKYCGKKEYDKFFNSDADGSYASYVGSYNSKNKERRVGNKRTSEELYKEIKKLLKDAPKEDENVQKILTSIENETFLPKQLTASNGVIPNQVHAREMKKILSNAENYLPFLTEKDETGLSVSERILKLFTFQIPYYVGPTSENSGKNGGNGWVVRREDGQVLPWNIDEKIDMKATSEAFISRMVRRCTYISGEQVLPKASLEYQSYCVLNEINNIKIDGERISVELKQDIYKAVFQKGKKVTKKQLCKYLHTRGIIETEEQVTGVDVSINNALTTYGKFKPIFGEDISKDSVQKMIEDIVFWCTVYGDSKKFLKDRIEEKYGNKLSEEQIKRILGFKFKDWGNLSKKFLELNGADTSTGESISIIRALWNNNLNLMELINSSLYNYKECLAEYQNTMLKTLSEIEAEDLNEYYFSAPVRRIIWQTILVIKELVKVLGCEPERIFVEMTRKPDEHKTRTSSRRNKFEELYKKVKDEATDWMQVIAKAEEDGKIRSKKMYLYLTQKGRCMYTGKHIELDDLFDKNLYDIDHIYPRHFVKDDNIDNNLVLVCKEKNAHKSDHYPIEEEIFLSQKKMWLELRKSGFITEEKYNRLMGRSPFSDEQKAGFIARQLVETSQGTKGVANILRQLLPGSKIVYAKASNVSEFRHTRDDIPKSRLVNDFHHAHDAYLNIVVGNVYYVKFTQNPLNFIKKDYDKYKEDYNLSKMFDWDVKRNGEVAWIAQRKDGEAGTITTVKRMLSRNTPLMTRYSFEGKGGLANETLCSAKKAKGEGYIPFKSSDDKMQDVTKYGGFTKVTGAYFFLVEHAEKKKRIRTIESVPVYLAQKIEQNPDELKKYCEEILGLVDADIRLKKIKIGSLIKRNGYFCYITGKTGNRLSVRNAVNLCLKNEWIKYISKLEKVKEKDAVDEIITKEKNEVLYSELIQKFKHGIFSKRPNPVEDKLEKGSEKFSNLSIKEQCAVLCQILQLAAVLGSECDMTLLGESAHCGKMLISKKIGDEEIYLLNQSVTGLYEKKINLHTV

SEQ ID NO: 3057 - protein, 1352 aa, Unknown
  Description of Unknown: uncultivated organism sequence
  Category: MG91 effectors
  Description: MG91-249 effector
MTAFKYYLGLDMGTNSVGWAATDPEYRLLKAKGKDLWGIREFNEASGAVERRTHRISRRRRQREQVRIGILKDYFHDAICEVDPGFFRRLENSKYHEEDKDVEVRYKNNIFNDSNYTDKDYFNEYPTIYHLRNELISSTEKHDVRLVFLALLNMFKHRGHFLNAGLGENNGESNIDNAYFELTELLSELTEYHLSQDIDCKQIEAILSRRDMSRTHKAEELAGVLHVDLKNKPYKELIRGLCGLKFNACVVFPDVQSEEVTKLDICLSESTFDEKSDEIANIIGEDYFEIIMAMKEMFDIGSLASIMKGHNYLSQARVASYTKHKEDLKLLKEVIKKYCGKKEYDKFFNSDADGSYASYVGSYNSKNKERRVGNKRTSEELYKEIKKLLKDAQKEDENVQKILTSIENETFLPKQLTASNGVIPNQVHAREMKKILSNAENYLPFLTEKDETGLSVSERILKLFTFQIPYYVGPTSENSGKNGGNGWVVRREDGQVLPWNIDEKIDMKATSEAFISRMVRRCTYISGEQVLPKASLEYQSYCVLNEINNIKIDGERISVELKQDIYKAVFQKGKKVTKKQLCKYLHTRGIIETEEQVTGVDVSINNALTTYGKFKPIFGEDISKDSVQKMIEDIVFWCTVYGDSKKFLKDRIEEKYGNKLSEEQIKRILGFKFKDWGNLSKKFLELNGADTSTGESISIIRALWNNNLNLMELINSSLYNYKECLAEYQNTMLKTLSEIEAEDLNEYYFSAPVRRMIWQTILVIKELVKVLGCEPERIFVEMTRRPDEHKTRTSSRRNKFEELYKKVKDEATDWMQVIAKAEEDGKIRSKKMYLYLTQKGRCMYTGKHIELDDLFDKNLYDIDHIYPRHFVKDDNIDNNLVLVCKEKNAHKSDHYPIEEEIFLSQKKMWLELRKSGFITEEKYNRLMGRSPFSDEQKAGFIARQLVETSQGTKGVANILRQLLPGSKIVYAKASNVSEFRHTRDDIPKSRLVNDFHHAHDAYLNIVVGNVYYVKFTQNPLNFIKKDYDKYKEDYNLSKMFDWDVKRNGEVAWIAQRKDGEAGTITTVKKMLSRNTPLMTRYSFEGKGGLANETLYSAKKAKGEGYIPFKSSDDKMQDVTKYGGFTKVTGAYFFLVEHTEKKKRIRTIESVPVYFVQKIEKNPGELKKYCEEILGLVDADIRLKKIKIGSLIKRNGYFCYITGKTGNRLSVRNAVNLCLKNEWIKYISKLEKVKEKDTIDEIITKEKNEVLYSELIQKFKHCIFSKRPNPVGDKLEKGSEKFSNLSIKDQCAVLCQVLRMAAILGSECDMTLLGESSICGEMKISKKIGDEEIYLINQSVTGLYEKKINLHTV

SEQ ID NO: 3058 - protein, 1352 aa, Unknown
  Description of Unknown: uncultivated organism sequence
  Category: MG91 effectors
  Description: MG91-250 effector
MTAFKYYLGLDMGTNSVGWAATDPEYRLLKAKGKDLWGIREFNEASGAVERRTHRISRRRRQREQVRIGILKDYFHDAICEVDPSFFRRLENSKYHEEDKDVEVRYKNNIFNDGNYTDKDYFNEYPTIYHLRNELISSTEKHDVRLVFLALLNMFKHRGHFLNAGLGENNGESNIDNAYFELTELLSELTEYHLSQDIDCKQIEAILSRRDMSRTHKAEELAGVLHVDLKNKPYKELIRGLCGLKFNACVVFPDVQSEEVTKLDICLSESSFDEKSDEIANIIGEDYFEIIMAMKEMFDIGSLASIMKGHNYLSQARVASYTKHKEDLKLLKEVIKKYCGKKEYDKFFNSDADGSYASYVGSYNSKNKERRVGNKRTSEELYKEIKKLLKDAPKEDENVQKILTSIENETFLPKQLTASNGVIPNQVHAREMKKILSNAENYLPFLTEKDETGLSVSERILKLFTFQIPYYVGPTSENSGKNGGNGWVVRREDGQVLPWNIDEKIDMKATSEAFISRMVRRCTYISGEQVLPKASLEYQSYCVLNEINNIKIDGERISVELKQDIYKAVFQKGKKVTKKQLCKYLHTRGIIETEEQVTGVDVSINNALTTYGKFKPIFGEDISKDSVQKMIEDIVFWCTVYGDSKKFLKDRIEEKYGNKLSEEQIKRILGFKFKDWGNLSKKFLELNGADTSTGESISIIRALWNNNLNLMELINSSLYNYKECLAEYQNTMLKTLSEIEAEDLNEYYFSAPVRRMIWQTILVIKELVKVLGCEPERIFVEMTRRPDEHKTRTSSRRNKFEELYKKVKDEATDWMQVIAKAEEDGKIRSKKMYLYLTQKGRCMYTGKHIELDDLFDKNLYDIDHIYPRHFVKDDNIDNNLVLVCKEKNAHKSDHYPIEEEIFLSQKKMWLELRKSGFITEEKYNRLMGRSPFSDEQKAGFIARQLVETSQGTKGVANILRQLLPGSKIVYAKASNVSEFRHTRDDIPKSRLVNDFHHAHDAYLNIVVGNVYYVKFTQNPLNFIKKDYDKYKEDYNLSKMFDWDVKRNGEVAWIAQRKDGEAGTITTVKRMLSRNTPLMTRYSFEGKGGLANETLCSAKKAKGEGYIPFKSSDDKMQDVTKYGGFTKVTGAYFFLVEHTEKKKRIRTIESVPVYLAQKIEQNPDELKKYCKEILGLVDADIRLKKIKIGSLIKRNGYFCYITGKTGNRLSVRNAVNLCLKNEWIKYISKLEKVKEKDAVDEIITKEKNEVLYSELIQKFKHGIFSKRPNPVEDKLEKGSEKFSNLSIKEQCAVLCQILQLAAVLGSECDMTLLGESAHCGKMLISKKIGDEEIYLLNQSVTGLYEKKINLHTV

SEQ ID NO: 3059 - protein, 1353 aa, Unknown
  Description of Unknown: uncultivated organism sequence
  Category: MG91 effectors
  Description: MG91-251 effector
MAVFKYYLGLDMGTNSVGWAVTDIQYNILKVKGKDLWGIREFNEASTAVERRTHRVSRRARQRKTVLIGLLKYYFHDEICKKDPYFFQRLDNSKYHLEDKDDEVKYTYNIFNDINYTDADYFKQYPTIFHLRNELIFNPNEHDIRLVYLALLNMFKHRGHFLNDSLIDDDSEMKIDEAYLELANLLSEYTEYYLKTDVNITELENILSDRDESRTKKSEKIVELLEIDSKNKPYKEMIRGLCGLKFNAITIFSDVQLEDGQKLDICLSDASFEEKADEIASILGEDYFQIILSMKRLYDIGSLSEIMKGYSYLSEARVASYKKHKEDLCCLKRVIKKYCNKECYEKIFNSDEDGSYASYVGSFNSNSKQRRVGNKRSIEDLYKEIKKILKAVPQEDADVQRILTSIDNETFLPKQLTASNGVIPNQIHEKEMKKILSNAENYLPFLKEKDEKNQTVSERILMLFTFRIPYYVGPTTENSQKNGGNGWVIRKEAGQVLPWNIEEKIDMKATSEAFISRMIRRCTYISGKPVLPRASLEYQSFCVLNAINNITIDGYRISVELKQDIYNDLFLKGKKVTKKQLCKYLYLRGLITSENQVSGIDIEINNTLSTYKIFKNIFGDDIIYDSTKIMIEDIVFWCTVYGESKKFLRERLCEKYGDKLSQNQIKRILGLKFKDWGNLSKEFLELSGVNKKTNESMSIIKALWENNLNMMELINSDLFDFKEKIVEYQTDLMKTIYNIEVDDLENYYFSAPVKRMVWQTILVVKELVGVLGCEPTRIFIEMTRRHDEITKRTINRKKKFEALYKSVKDEDTDWMNVIADADDTGRIRSKKMYLYLTQKGRCMYTGKHIELSDLFNNNLYDIDHIYPRHFVKDDNIDNNLVLVCKEKNAHKRDIYPLEEQIYSSQKGMWLELKKLGFINEEKYNRLTGRNSFTDEQKAGFIARQLVETSQGTKGVANILQQLLPESKIVYAKASNVSEFRQSRDIPKSRLVNEFHHAHDAYLNIVVGNVYYVKFTQDPLKFIKNDYDKDKINNNYNLSKMFDWDVKRKGEVAWIAQKKNGDVGTIATVKKVLSKNTPLMTRYCFEGRGKISKEERHSAKEAKQVGYLPYKTSDLKIKDVTKYGGFTSITVAYYFVVEHDEKKKRIRTIESVPLYLAAKINSNHEELDKYCKNELGLVNFNIRVRKIRIGSLLKQNGYFFYITGKTGNRLIVRNAVNICFRKEWIKYSSKIEKYQEKKIIDDIITKDKNELFYDEFIKKYENSIFANRPNSILEKLKKAFPVFKESNIEQQCSILYQLLNLSKILGSECDLRLIGESPNCGKMLINKKIGDDDIYLINQSVTGLYENKINLRTV

SEQ ID NO: 3060 - protein, 1352 aa, Unknown
  Description of Unknown: uncultivated organism sequence
  Category: MG91 effectors
  Description: MG91-252 effector
MTAFKYYLGLDMGTNSVGWAATDPGYRLLKAKGKDLWGIREFNEASGAVERRTHRISRRRRQREQVRIGILKDYFHDAICEVDPGFFQRLENSKYHEEDKDVEVRYKNNIFNDSNYTDKDYFNEYPTIYHLRNELISSTEKHDVRLVFLALLNMFKHRGHFLNAGLGENNGESNIDNAYFELTELLSELTEYHLSQDIDCKQIEAILSRRDMSRTHKAEELAGVLHVDLKNKPYKELIRGLCGLKFNACVVFPDVQSEEVTKLDICLSESTFDEKSDEIANIIGEDYFEIIMAMKEMFDIGSLASIMKGHNYLSQARVASYTKHKEDLKLLKEVIKKYCSKKEYDKFFNSDADGSYASYVGSYNSKNKERRVGNKRTSEELYKEIKKLLKDAQKEDENVQKILTSIENETFLPKQLTASNGVIPNQVHAREMKKILSNAENYLPFLTEKDETGLSVSERILKLFTFQIPYYVGPTSENSGKNGGNGWVVRREDGQVLPWNIDEKIDMKATSEAFISRMVRRCTYISGEQVLPKASLEYQSYCVLNEINNIKIDGERISVELKQDIYKAVFQKGKKVTKKQLCKYLHTRGIIETEEQVTGVDVSINNALTTYGKFKPIFGEDISKDSVQKMIEDIVFWCTVYGDSKKFLKDRIEEKYGNKLSEEQIKRILGFKFKDWGNLSKKFLELNGADTSTGESISIIRALWNNNLNLMELINSSLYNYKECLAEYQNTMLKTLSEIEAEDLNEYYFSAPVRRMIWQTILVIKELVKVLGCEPERIFVEMTRKPDEHKTRTSSRRNKFEELYKKVKDETTDWMQVIANAEEDGKIRSKKMYLYLTQKGRCMYTGKHIELDDLFDNNLYDIDHIYPRHFVKDDNIDNNLVLVCKEKNAHKSDHYPIEEEIFLSQKKMWLELRKSGFITEEKYNRLMDRNPFSDEQKAGFIARQLVETSQGTKGVANILRQLLPGSKIVYAKASNVSEFRCTRDDIQKSRLVNDFHHAHDAYLNIVVGNVYYVKFTQNPLNFIKKDYDKYKEDYNLSKMFDWDVKRNGEVAWIAQRKDGAAGTITTVKRMLSRNTPLMTRYSFDGKGGLTNETLYSAKKAKGEGYIPFKSSDDKMQDVTKYGGFTSVTGAYFFLVEHTEKKKRIRTIESVPVYLAQKIEQNPDELKKYCEEILGLIDADIRLKKIKIGSLIKRNGYFCYITGKTGNRLIVRNAVNLCLKNEWIKYISKLEKVKEKDAVDKIITKEKNEVLYSELIQKFKHGIFSKRPNPVGDKLEKDSEKFNNLSIKDQCAVLCQVLRMAAILGSECDMTLLGDSPNCGKMLISKKIGDEEIYLINQSVTGLYEKKINLHTV

SEQ ID NO: 3061 - protein, 1358 aa, Unknown
  Description of Unknown: uncultivated organism sequence
  Category: MG91 effectors
  Description: MG91-253 effector
MEKEYYLGLDMGTNSVGWAVTDDAYNLIRFKGKDMWGIREFDEANPAVERRTHRTSRRREQRNAVRMGLIRSYFADEIQKVDSNFYQRLDNSFFHVEDKQDNVKDKNGIFNDKNYKDADYYKQYPTIFHLRKELIEDASQKDVRLVYLAVANMFKHRGHFLLSGIGSESSKQTITDLYNQVSGLITEEYGISLKTDIAGTDFEQVLCSREYSRTRKSEKVCEILEIKNSDKLKKAFVKSMCGLSVKITDVIDDTFTEISDEDKKITFSFVDSDYDEKAGVLEEKLGTDVYDIISKLKEIHDKAQVAEIMKNYQYLSFARVADYEKHKKDLKILKRVVKKYFEPTVYDKLFRSGENGTYSAYVNSFNSGEKSRRNYKERKQEDLYNSIKKLLKSIDNVCDTDIEYIKNEIEKENFLPKQLTFKNGVIPNQIHVSELKAILKNAEKYLPFLNEKDESGYTVSERILMLFSFQIPYYVGPVSPNSNGWVKRLEPGQVLPWNIDKKIDLKETSEQFIQRMVRNCTYIAGEKVLPKASLLYENFKVLNEINNLSINGERIAVALKQDLYNTLFLKGKRVTRKQIFNYFHSRGLVEEDSQISGIDIAVNNSLSTYGKFLPLFGEHLKEDKYKKMVDDIVFWCTVYGDSRKFLREQLEEKYSDVLDENQIKRITGMKFKDWGNLSKEFLELLGCCKSTGEMIPLIRAMWETNYNLMELLHSEEFTYSEELEEKQGKIEKVLSEYTIDDLNEEYFSAPVKRMVWQTLLIIKEIEKIMKCPPTRIFVEMTRKDDEKGDNGRKSSRKDQLLALYKKIQSEDKEWKKEMSLRIEDYDKNGALRSKKLYLYFIQKGLDMYTGKPIDLDNLMSANSNYDIDHIYPRHFVKDDNINNNLVLASKPANAEKSDIYPIKDSIYQKMKYTWKVLRDEGLITEEKYKRLTGRNPFTDEQKAGFIARQLVETGQGTKGVADLLTALLPDTKLVYSKAGNVSDFRKRYDIPKSRLINDFHHAHDAYLNIVVGNIYFTKFTSNPLNYIRKECSSKDNKYQYNLGNMYKWDVKRDGKTAWIAAKEGETGTIATVKKILSRNTPTLTRLTIEGHGGIADATLYSHKKAKQDAYIPLKSSDARMADVTKYGGYSSVTTAYLFLVEHEIKGKKIRTLETVPLYLKDRLENSKEKLEEYCRESLGYTNPSVRMKKIKLQSLIKLNGYYMQISGKSIKQFEVRNYVQICLNGKWVDYIHKLEKYQDKGVIDNAITDEKNVELYNILCEKHSVGIFTLRPNPVGDKIKKGYDKFVNLTTEEQIKLLIEIIKLTCVGIVKADLRLIGASEKSGTMKINKNITDAKECFLINQSVTGLYENRIDLLRV

SEQ ID NO: 3062 - protein, 1358 aa, Unknown
  Description of Unknown: uncultivated organism sequence
  Category: MG91 effectors
  Description: MG91-254 effector
MEKEYYLGLDMGTNSVGWAVTDDAYNLIRFKGKDMWGIREFDEANPAVERRTHRTSRRRKQRNAVRMGLIRSYFADEIQKVDSNFYQRLDNSFFHVEDKQDNVKDKNGIFNDKNYKDADYYKQYPTIFHLRKELIEDASQKDVRLVYLAVANMFKHRGHFLLSGIGSESSKQTITDLYNQVSGLITEEYGISLKTDIAGTDFEQVLCSREYSRTRKSEKVCEILEIKNSDKLKKAFVKSMCGLSVKITDIIDDTFTEISDEDKKITFSFVDSDYDEKAGVLEEKLGTDVYDIISKLKEIHDKAQVAEIMKNYQYLSFARVADYEKHKKDLKILKRVVKKYFEPTVYDKLFRSEENGTYSAYVNSFNSEEKSRRNYKERKQEDLYNSIKKLLKSVDNVDDTDIEYIKNEMDKENFLPKQLTFKNGVIPNQIHASELKAILKNAEKYLPFLNEKDESGYTVSERILMLFSFQIPYYVGPVSSNSNGWVKRLEPGQVLPWNIDKKIDLKETSEQFIQRMVRNCTYIAGEKVLPKASLLYENFKVLNEINNLSINGERITVNLKQDLYNTLFLKGKRVTRKQIFNYFHSRGLVEEDSQISGIDIAVNNSLSTYGKFLPLFGEHLKEDKYKKMVDDIVFWCTVYGDSRKFLREQLEEKYSDVLDENQIKRITGMKFKDWGNLSKEFLELSGCCKSTGEVMPLIRAMWETNYNLMELLHSEEFTYSEELEEKQGKIEKVLSEYTIDDLNEEYFSAPVKRMVWQTLLIIKEIEKIMKCPPTRIFVEMTRKDDEKGDNGRKSSRKDQLLALYKKIQSEDKEWKKEMSSRIEDYDKNGALRSKKLYLYFIQKGLDMYTGKPIDLDNLMSANSNYDIDHIYPRHFVKDDNINNNLVLASKPANAEKSDIYPIKDSIYQKMKYTWKVLRDEGLITEEKYKRLTGRNPFTDEQKAGFIARQLVETGQGTKGVADLLTALLPDTKLVYSKAGNVSDFRKRYDIPKSRLINDFHHAHDAYLNIVVGNIYFTKFTSNPLNYIRKECSSKDNKYQYNLGNMYKWDVKRDGKTAWVAPEEGETGTLATVKKMLSRNTPILTRLTIEGHGGIADATLYSHKKAKQDTYIPLKSSDARMADVTKYGGYSSVTTAYLFLVEHEIKGKKIRTLETVPIYLKDRLENSKEKLEEYCRETLGYTNPSVRMKKIKLQSLIKLNGYYMQISGRTGNRFTLRNYVQLCLNGKWVDYIHKLEKYQDKGVIDDLITDERNVELYNVLCEKHSVGIFTLRPNLVGDKIKNGYDKFVNLTTEEQIKLLIEIIKLTCVGIVSANLTLIGGAAISGKMLMSKNITYANECILINQSVTGLYENRIDLLRV

SEQ ID NO: 3063 - protein, 1352 aa, Unknown
  Description of Unknown: uncultivated organism sequence
  Category: MG91 effectors
  Description: MG91-255 effector
MTAFKYYLGLDMGTNSVGWAATDPEYRLLKAKGKDLWGIREFNEASGAVERRTHRISRRRRQREQVRIGILKDYFHDAICEVDPGFFQRLENSKYHEEDKDVEVRYKNNIFNDSNYTDKDYFNEYPTIYHLRNELISSTEKHDVRLVFLALLNMFKHRGHFLNAGLGENNGESNIDNAYFELTELLSELTEYHLSQDIDCKQIEAILSRRDMSRTHKAEELAGVLHVDLKNKPYKELIRGLCGLKFNACVVFPDVQSEEVTKLDICLSESTFDEKSDEIANIIGEDYFEIIMAMKEMFDIGSLASIMKGHNYLSQARVASYTKHKEDLKLLKEVIKKYCGKKEYDKFFNSDADGSYASYVGSYNSKNKERRVGNKRTSEELYKEIKKLLKDAQKEDENVQKILTSIENETFLPKQLTASNGVIPNQVHAREMKKILSNAENYLPFLTEKDETGLSVSERILKLFTFQIPYYVGPTSENSGKNGGNGWVVRREDGQVLPWNIDEKIDMKATSEAFISRMVRRCTYISGEQVLPKASLEYQSYCVLNEINNIKIDGERISVELKQDIYKAVFQKGKKVTKKQLCKYLHTRGIIETEEQVTGVDVSINNALTTYGKFKPIFGEDISKDSVQKMIEDIVFWCTVYGDSKKFLKDRIEEKYGNKLSEEQIKRILGFKFKDWGNLSKKFLELNGADTSTGESISIIRALWNNNLNLMELINSSLYNYKECLAEYQNTMLKTLSEIEAEDLNEYYFSAPVRRMIWQTILVIKELVKVLGCEPERIFVEMTRKPDEHKTRTSSRRNKFEELYKKVKDETTDWMQVIANAEEDGKIRSKKMYLYLTQKGRCMYTGKHIELDDLFDNNLYDIDHIYPRHFVKDDNIDNNLVLVCKEKNAHKSDHYPIEEEIFLSQKKMWLELRKSGFITEEKYNRLMDRNPFSDEQKAGFIARQLVETSQGTKGVANILRQLLPGSKIVYAKASNVSEFRCTRDDIQKSRLVNDFHHAHDAYLNIVVGNVYYVKFTQNPLNFIKKDYDKYKEDYNLSKMFDWDVKRNGEVAWIAQRKDGAAGTITTVKRMLSRNTPLMTRYSFDGKGGLTNETLYSAKKAKGEGYIPFKSSDDKMQDVTKYGGFTSVTGAYFFLVEHTEKKKRIRTIESVPVYLAQKIEQNPDELKKYCEEILGLIDADIRLKKIKIGSLIKRNGYFCYITGKTVNRLIVRNAVNLCLKNEWIKYISKLEKVKEKDAVDKIITKEKNEVLYSELIQKFKHGIFSKRPNPVGDKLEKDSEKFNNLSIKDQCAVLCQVLRMAAILGSECDMTLLGDSPNCGKMLISKKIGDEEIYLINQSVTGLYEKKINLHTV

SEQ ID NO: 3064 - protein, 1358 aa, Unknown
  Description of Unknown: uncultivated organism sequence
  Category: MG91 effectors
  Description: MG91-256 effector
MEKEYYLGLDMGTNSVGWAVTDDAYNLIRFKGKDMWGIREFDEANPAVERRTHRTSRRREQRNAVRMGLIRSYFADEIQKVDSNFYQRLDNSFFHVEDKQDNVKDKNGIFNDKNYKDADYYKQYPTIFHLRKELIEDASQKDVRLVYLAVANMFKHRGHFLLSGIGSESSKQTITDLYNQVSGLITEEYGISLKTDIAGTDFEQVLCSREYSRTRKSEKVCEILEIKNSDKLKKAFVKSMCGLSVKITDIIDDTFTEISDEDKKITFSFVDSDYDEKAGVLEEKLGTDVYDIISKLKEIHDKAQVAEIMKNYQYLSFARVADYEKHKKDLKILKRVVKKHFEPTVYDKLFRSEENGTYSAYVNSFNSEEKSRRNYKERKHEDLYNSIKKLLKSVDNVDDTDIEYIKNEMDKENFLPKQLTFKNGVIPNQIHASELKAILKNAEKYLPFLNEKDESGYTVSERILMLFSFQIPYYVGPVSSNSNGWVKRLESGQVLPWNIDKKIDLKETSEQFIQRMVRNCTYIAGEKVLPKASLLYENFKVLNEINNLSINGERITVNLKQDLYNTLFLKGKRVTRKQIFNYFHSRGLVEEDSQISGIDIAVNNSLSTYGKFLPLFGEHLKEDKYKKMVDDIVFWCTVYGDSRKFLREQLEEKYSDVLDENQIKRITGMKFKDWGNLSKEFLELSGCCKSTGEVMPLIRAMWETNYNLMELLHSEEFTYSEELEEKQGKIEKVLSEYTIDDLNEEYFSAPVKRMVWQTLLIIKEIEKIMKCPPTRIFVEMTRKDDEKGDNGRKSSRKDQLLALYKKIQSEDKEWKKEMSSRIEDYDKNGALRSKKLYLYFIQKGLDMYTGKPIDLDNLMSANSNYDIDHIYPRHFVKDDNINNNLVLASKPANAEKSDIYPIKDSIYQKMKYTWKVLRDEGLITEEKYKRLTGRNPFTDEQKAGFIARQLVETGQGTKGVADLLTALLPDTKLVYSKAGNVSDFRKRYDIPKSRLINDFHHAHDAYLNIVVGNIYFTKFTSNPLNYIRKECSSKDNKYQYNLGNMYKWDVKRDGKTAWIAAKEGETGTIATVKKILSRNTPTLTRLTIEGHGGIADATLYSHKKAKQDAYIPLKSSDARMADVTKYGGYSSVTTAYLFLVEHEIKGKKIRTLETVPLYLKDRLENSKEKLEEYCRETLGYTNPSVRMKKIKLQSLIKLNGYYMQISGRTGNRFTLRNYVQLCLNGKWVDYIHKLEKYQDKGFIDNVITDEKNVELYNVLCEKHSVGIFTLRPNPVGDKIKKGYDKFVNLTTEEQIKLLIEIIKLTCVGIVSANLTLIGGASISGKMLISKNITDAKECLLINQSVTGLYENRIDLLRV

SEQ ID NO: 3065 - protein, 1358 aa, Unknown
  Description of Unknown: uncultivated organism sequence
  Category: MG91 effectors
  Description: MG91-257 effector
MRETGKDYYLGLDMGTNSVGWAVTDENYVLMRAKGKDLWGIREFDEALTAVDRRTHRVARRRRQREIARIGLLKEYFHDAIAEVDPDFYQRLDNSKYHEEDKDSAVKGKNGIFNDANYNDKDYFKQYPTIFHLRKELIESTEKHDVRLVYLALLNMFKHRGHFLNAGLSTESENTMDTAYHNFVETAAQTIECNFMETVDIEKIKEILGSRDYSRSKKAELVAQILHVDSKNKVQMACIKCICGLKVTAAAIFGDKMAADEEKKTDICFSDFGYDEKVPVILEIVGEENFELVLAMQEIYDIGSLAGIMKDSLYLSMARVKEYEQHGKDLRILKGVVKKYGTKEEYDTLFRTMEEGTYSAYVNSVNTKKKSRRDVKKRTRDEFYGRLKKIISKMPQNDSDVLYIKDKMEKEAFLPKQLTASNGVIPNQIHAREMKKILQNAEIYLPFLKEKDTSGLTVSERILKLFSFQIPYYVGPVSEKSKLNGGNGWVVRKEEGTVLPWNIEEKIDMTATSREFVERMVRRCSYLSDERVLPKGSLLYERFCVLNEINAIKVDGVKIPVEIKQDLYSKYFKKGKKVTKKKIAEFLIARGVIKEDQTELISGIDIAVNSTLSTYAKFYAIFGEKMEQDSYKKMVEQIVEWCTIYGDAKKFLEQKIKECYGNVLTQEEIKRITGFKFRDWGRLSKEFLELSGCSKATGEVMPLISMMWETNDNLMELLDDNYYTYREALEEKQNNAFKLLADIEPEDLDEMYFSAPVKRMVWQTLCIIKELEKVLGKAPKRLFVEMTRNEQKDKKRTDSRKQQFLDLYKNIKDESRDWKELITRADENGTLKSKKMYLYLTQMGRCMYTGHPIDLEDLFKDNRYDIDHIYPRHFVKDDNIMNNLVLVEKEKNAHKSDNYPLEEEIYKKQLPMWKDLHQRKLITDEKFKRLTGRNEFTDEQKAGFIARQLVETSQGTKGVTTILERALPDTKIVYAKASNVSEFRQKRDLLKSRVVNDFHHAQDAYLNIVVGNVYFVKFTQNPLHFIKAEYDKNKAQYEYNLSRMFDRDVRRGNETAWIGCKKGEEAGTILTVKKMMAKNTPMLTRLSFEGKGGLADQTLYSAEKAKGNGYIPLKTSDSKMQDVTKYGGFNSVSTAYFFLVEHELKGKKVRTLETVPIIWRDRIEKDETMLLKYCTDVLELKNPSIRVKKIKLQSYIKKDGYYMYITGKTLNRIIIKNAVQMCLQQKWIVYIKNIEKAIQKKTIDATITYDANLELYNLIERKYKYEIFKNRPNPMGDKIEQGKKLFEEKSLLEQSKILYELLQLSAIGNVKADLQLIGGSASSGVMLIPKNITDSKEFILINQSVTGLFEQKVDLLTV

SEQ ID NO: 3066 - protein, 1358 aa, Unknown
  Description of Unknown: uncultivated organism sequence
  Category: MG91 effectors
  Description: MG91-258 effector
MEKEYYLGLDMGTNSVGWAVTDDAYNLIRFKGKDMWGIREFDEANPAVERRTHRTSRRREQRNAVRMGLIRSYFADEIQKVDSNFYQRLDNSFFHVEDKQDNVKDKNGIFNDKNYKDADYYKQYPTIFHLRKELIEDASQKDVRLVYLAVANMFKHRGHFLLSGIGSESSKQTITDLYNQVSGLITEEYGISLKTDIAGTDFEQVLCSREYSRTRKSEKVCEILEIKNSDKLKKAFVKSMCGLSVKITDVIDDTFTEISDEDKKITFSFVDSDYDEKAGVLEEKLGTDVYDIISKLKEIHDKAQVAEIMKNYQYLSFARVADYEKHKKDLKILKRVVKKYFEPTVYDKLFRSGENGTYSAYVNSFNSGEKSRRNYKERKQEDLYNSIKKLLKSIDNVCDTDIEYIKNEIEKENFLPKQLTFKNGVIPNQIHVSELKAILKNAEKYLPFLNEKDESGYTVSERILMLFSFQIPYYVGPVSPNSNGWVKRLEPGQVLPWNIDKKIDLKETSEQFIQRMVRNCTYIAGEKVLPKASLLYENFKVLNEINNLSINGERITVNLKQDLYNTLFLKGKRVTRKQIFNYFHSRGLVEEDSQISGIDIAVNNSLSTYGKFLPLFGEHLKEDKYKKMVDDIVFWCTVYGDSRKFLREQLEEKYSDVLDENQIKRITGMKFKDWGNLSKEFLELSGCCKSTGEVMPLIRAMWETNYNLMELLHSEEFTYSEELEEKQGKIEKVLSEYTIDDLNEEYFSAPVKRMVWQTLLIIKEIEKIMKCPPTRIFVEMTRKDDEKGDNGRKSSRKDQLLALYKKIQSEDKEWKKEMSSRIEDYDKKGALRSKKLYLYFIQKGLDMYTGKPIDLDNLMSANSNYDIDHIYPRHFVKDDNINNNLVLASKPANAEKSDIYPIKDSIYQKMKYTWKVLRDEGLITEEKYKRLTGRNPFTDEQKAGFIARQLVETGQGTKGVADLLTALLPDTKLVYSKAGNVSDFRKKYDIPKSRLINDFHHAHDAYLNIVVGNIYFTKFTSNPLNYIRKECSSKDNKYQYNLGNMYKWDVKRDGKTAWIAAKEGETGTIATVKKMLSRNTPTLTRLTIEGHGGIADATLYSHKKAKQDAYIPLKSSDARMADVTKYGGYSSVTTAYLFLVEHEIKGKKIRTLETVPLYLKDRLENSKEKLEEYCRETLGYTNPSVRMKKIKLQSLIKLNGYYMQISGKTNKQFTVRNYVQFCLNSKWVDYIHKLEKYQDKGVIDDAITDEKNVELYNVLCEKHSVGIFTLRPNPVGDKIKKGYDKFVNLTTEEQIKLLIEIIKLTCVGIVSANLTLIGGASISGKMLISKNITDAKECLLINQSVTGLYENRIDLLRV

SEQ ID NO: 3067 - protein, 1358 aa, Unknown
  Description of Unknown: uncultivated organism sequence
  Category: MG91 effectors
  Description: MG91-259 effector
MEKEYYLGLDMGTNSVGWAVTDDAYNLIRFKGKDMWGIREFDEANPAVERRTHRTLRRREQRNAVRMGLIRSYFADEIQKVDSNFYQRLDNSFFHVEDKRDNVKDKNGIFNDKNYKDADYYKQYPTIFHLRKELIEDASQKDVRLVYLAVANMFKHRGHFLLSGIGSESSKQTITDLYNQVSGLITEEYGISLKTDIAGTDFEQVLCSREYSRTRKSEKVCEILEIKNSDKLKKAFVKSMCGLSVKITDIIDDTFTEISDEDKKITFSFVDSDYDEKAGVLEEKLGTDVYDIISKLKEIHDKAQVAEIMKNYQYLSFARVADYEKHKKDLKILKRVVKKHFEPTVYDKLFRSEENGTYSAYVNSFNSGEKSRRNYKERKQEDLYNSIKKLLKSVDNVDDTDIEYIKNEMDKENFLPKQLTFKNGVIPNQIHASELKAILKNAEKYLLFLNEKDESGYTVSERILMLFSFQIPYYVGPVSSNSNGWVMRLESGQVLPWNIDKKIDLKETSEQFIQRMVRNCTYIAGEKVLPKASLLYENFKVLNEINNLSINGERITVNLKQDLYNTLFLKGKRVTRKQIFNYFHSRGLVEEDSQISGIDIAVNNSLSTYGKFLPLFGEHLKEDKYKKMVDDIVFWCTVYGDSRKFLREQLEEKYSDVLDENQIKRITGMKFKDWGNLSKEFLELSGGCKSTGEMIPLIRAMWETNYNLMELLHSEEFTYSEELEEKQGKIEKVLSEYTIDDLNEEYFSAPVKRMVWQTLLIIKEIEKIMKCPPTRIFVEMTRKDDEKGDNGRKSSRKDQLLALYKKIQSEDKEWKKEMSSRIEDYDKNGALRSKKLYLYFIQKGLDMYTGKPIDLDNLMSANSNYDIDHIYPRHFVKDDNINNNLVLASKPANAEKSDIYPIKDSIYQKMKYTWKVLRDEGLITEEKYKRLTGRNPFTDEQKAGFIARQLVETGQGTKGVADLLTALLPDTKLVYSKAGNVSDFRKMYDIPKSRLINDFHHAHDAYLNIVVGNIYFTKFTSNPLNYIRKECSSKDNKYQYNLGNMYKWDVKRDGKTAWIAAKEGETGTIATVKKMLSRNTPTLTRLTIEGHGGIADATLYSHKKAKQDAYIPLKSSDARMADVTKYGGYSSVTTAYLFLVEHEIKGKKIRTLETVPLYLKDRLENSKEKLEEYCRETLGYTNPSVRMKKIKLQSLIKLNGYYMQISGKSIKQFEVRNYVQICLNGKWVDYIHKLENYQDKGVIDNAITDEKNVELYNILCEKHSVGIFTLRPNPVGDKIKKGYDKFVNLTTEEQIKLLIEIIKLTCVGIVKADLRLIGASEKSGTMKINKNITDAKECFLINQSVTGLYENRIDLLRV

SEQ ID NO: 3068 - protein, 1352 aa, Unknown
  Description of Unknown: uncultivated organism sequence
  Category: MG91 effectors
  Description: MG91-260 effector
MTAFKYYLGLDMGTNSVGWAATDPEYRLLKAKGKDLWGIREFNEASGAVERRTHRISRRRRQREQVRIGILKDYFHDAICEVDPSFFRRLENSKYHEEDKDVEVRYKNNIFNDGNYTDKDYFNEYPTIYHLRNELISSTEKHDVRLVFLALLNMFKHRGHFLNAGLGENNGESNIDNAYFELTELLSELTEYHLSQDIDCKQIEAILSRRDMSRTHKAEELAGVLHVDLKNKPYKELIRGLCGLKFNACVVFPDVQSEEVTKLDICLSESSFDEKSDEIANIIGEDYFEIIMAMKEMFDIGSLASIMKGHNYLSQARVASYTKHKEDLKLLKEVIKKYCGKKEYDKFFNSDADGSYASYVGSYNSKNKERRVGNKRTSEELYKEIKKLLKDAPKEDENVQKILTSIENETFLPKQLTASNGVIPNQVHAREMKKILSNAENYLPFLTEKDETGLSVSERILKLFTFQIPYYVGPTSENSGKNGGNGWVVRREDGQVLPWNIDEKIDMKATSEAFISRMVRRCTYISGEQVLPKASLEYQSYCVLNEINNIKIDGERISVELKQDIYKAVFQKGKKVTKKQLCKYLHTRGIIETEEQVTGVDVSINNALTTYGKFKPIFGEDISKDSVQKMIEDIVFWCTVYGDSKKFLKDRIEEKYGNKLSEEQIKRILGFKFKDWGNLSKKFLELNGADTSTGESISIIRALWNNNLNLMELINSSLYNYKECLAEYQNTMLKTLSEIEAEDLNEYYFSAPVRRIIWQTILVIKELVKVLGCEPERIFVEMTRKPDEHKTRTSSRRNKFEELYKKVKDEATDWMQVIAKAEEDGKIRSKKMYLYLTQKGRCMYTGKHIELDDLFDKNLYDIDHIYPRHFVKDDNIDNNLVLVCKEKNAHKSDHYPIEEEIFLSQKKMWLELRKSGFITEEKYNRLMGRSPFSDEQKAGFIARQLVETSQGTKGVANILRQLLPGSKIVYAKASNVSEFRHTRDDIPKSRLVNDFHHAHDAYLNIVVGNVYYVKFTQNPLNFIKKDYDKYKEDYNLSKMFDWDVKRNGEVAWIAQRKDGEAGTITTVKRMLSRNTPLMTRYSFEGKGGLANETLCSAKKAKGEGYIPFKSSDDKMQDVTKYGGFTKVTGAYFFLVEHTEKKKRIRTIESVPVYLAQKIEQNPDELKKYCEEILGLVDADIRLKKIKIGSLIKRNGYFCYITGKTGNQLSVRNAVNLCLKNEWIKYISKLEKVKEKDAVDEIITKEKNEVLYSELIQKFKHGIFSKRPNPVEDKLEKGSEKFSNLSIKEQCAVLCQILQLAAVLGSECDMTLLGESAHCGKMLISKKIGDEEIYLLNQSVTGLYEKKINLHTV

SEQ ID NO: 3069 - protein, 1352 aa, Unknown
  Description of Unknown: uncultivated organism sequence
  Category: MG91 effectors
  Description: MG91-261 effector
MTAFKYYLGLDMGTNSVGWAATDPGYRLLKAKGKDLWGIREFNEASGAVERRTHRISRRRRQREQVRIGILKDYFHDAICEVDPSFFQRLENSKYHEEDKDVEVRYKNNIFNDSNYTDKDYFNEYPTIYHLRNELISSTEKHDVRLVFLALLNMFKHRGHFLNAGLGENNGESNIDNAYFELTELLSELTEYHLSQDIDCKQIEAILSRRDMSRTHKAEELAGVLHVDLKNKPYKELIRGLCGLKFNACVVFPDVQSEEVTKLDICLSESTFDEKSDEIANIIGEDYFEIIMAMKEMFDIGSLASIMKGHNYLSQARVASYTKHKEDLKLLKEVIKKYCGKKEYDKFFNSDADGSYASYVGSYNSKNKERRVGNKRTSEELYKEIKKLLKDAQKEDENVQKILTSIENETFLPKQLTASNGVIPNQVHAREMKKILSNAENYLPFLTEKDETGLSVSERILKLFTFQIPYYVGPTSENSGKNGGNGWVVRREDGQVLPWNIDEKIDMKATSEAFISRMVRRCTYISGEQVLPKASLEYQSYCVLNEINNIKIDGERISVELKQDIYKAVFQKGKKVTKKQLCKYLHTRGIIETEEQVTGVDVSINNALTTYGKFKPIFGEDISKDSVQKMIEDIVFWCTVYGDSKKFLKDRIEEKYGNKLSEEQIKRILGFKFKDWGNLSKKFLELNGADTSTGESISIIRALWNNNLNLMELINSSLYNYKECLAEYQNTMLKTLSEIEAEDLNEYYFSAPVRRMIWQTILVIKELVKVLGCEPERIFVEMTRRPDEHKTRTSSRRNKFEELYKKVKDETTDWMQVIANAEEDGKIRSKKMYLYLTQKGRCMYTGKHIELDDLFDNNLYDIDHIYPRHFVKDDNIDNNLVLVCKEKNAHKSDHYPIEEEIFLSQKKMWLELRKSGFITEEKYNRLMGRSPFSDEKKAGFIARQLVETSQGTKGVANILRQLLPGSKIVYAKASNVSEFRHTRDDIPKSRLVNDFHHAHDAYLNIVVGNVYYVKFTQNPLNFIKKDYDKYKEDYNLSKMFDWDVKRNGEVAWIAQRKDGEAGTITTVKKMLSRNTPLMTRYSFEGKGGLANETLYSAKKAKGEGYIPFKSSDDKMQDVTKYGGFTKVTGAYFFLVEHTEKKKRIRTIESVPVYLAQKIEQNPDELKKYCEEILGLVDADIRLKKIKIGSLIKRNGYFCYITGKTGNRLSVRNAVNLCLKNEWIKYISKLEKVKEKDTVDEIITKEKNEVLYSELIQKFKHGIFSKRPNPVEDKLEKGSEKFSNLSIKEQCAVLCQILQLAAVLGSECDMTLLGESAHCGKMLISKKIGDEEIYLLNQSVTGLYEKKINLHTV

SEQ ID NO: 3070 - protein, 1358 aa, Unknown
  Description of Unknown: uncultivated organism sequence
  Category: MG91 effectors
  Description: MG91-262 effector
MEKEYYLGLDMGTNSVGWAVTDDAYNLIRFKGKDMWGIREFDEANPAVERRTHRTSRRREQRNAVRMGLIRSYFADEIQKVDSNFYQRLDNSFFHVEDKQDNVKDKNGIFNDKNYKDADYYKQYPTIFHLRKELIEDASQKDVRLVYLAVANMFKHRGHFLLSGIGSESSKQTITDLYNQVSGLITEEYGISLKTDIAGTDFEQVLCSREYSRTRKSEKVCEILEIKNSDKLKKAFVKSMCGLSVKITDVIDDTFTEISDEDKKITFSFVDSDYDEKAGVLEEKLGTDVYDIISKLKEIHDKAQVAEIMKNYQYLSFARVADYEKHKKDLKILKRVVKKYFEPTVYDKLFRSGENGTYSAYVNSFNSGEKSRRNYKERKQEDLYNSIKKLLKSIDNVCDTDIEYIKNEIEKENFLPKQLTFKNGVIPNQIHVSELKAILKNAEKYLPFLNEKDESGYTVSERILMLFSFQIPYYVGPVSPNSNGWVKRLEPGQVLPWNIDKKIDLKETSEQFIQRMVRNCTYIAGEKVLPKASLLYENFKVLNEINNLSINGERIAVALKQDLYNTLFLKGKKVTRKQIFNYFHSRGLVEEDSQISGIDIAVNNSLSTYGKFLPLFGEHLKEDKYKKMVDDIVFWCTVYGDSRKFLREQLEEKYSDVLDENQIKRITGMKFKDWGNLSKEFLELSGCCKSTGEMIPLIRAMWETNYNLMELLHSEEFTYSEELEEKQGKIEKVLSEYTIDDLNEEYFSAPVKRMVWQTLLIIKEIEKIMKCPPTRIFVEMTRKDDEKGDNGRKSSRKDQLLALYKKIQSEDKEWKKEMSSRIEDYDKNGALRSKKLYLYFIQKGLDMYTGKPIDLDNLMSANSNYDIDHIYPRHFVKDDNINNNLVLASKPANAEKSDIYPIKDSIYQRMKYTWKVLRDEGLITEEKYKRLTGRNPFTDEQKAGFIARQLVETGQGTKGVADLLTALLPDTKLVYSKAGNVSDFRKRYDIPKSRLINDFHHAHDAYLNIVVGNIYFTKFTSNPLNYIRKECSSKDNKYQYNLGNMYKWDVKRDGKTAWIAAKEGETGTIATVKKMLSRNTPTLTRLTIEGHGGIADATLYSHKKAKQDAYIPLKSSDARMADVTKYGGYSSVTTAYLFLVEHEIKGKKIRTLETVPLYLKDRLENSKEKLEEYCRESLGYTNPSVRMKKIKLQSLIKLNGYYMQISGKSIKQFEVRNYVQICLNGKWVDYIHKLEKYQDKGVIDNAITDEKNVELYNILCEKHSVGIFTLRPNPVGDKIKKGYDKFVNLTTEEQIKLLIEIIKLTCVGIVKADLRLIGASEKSGTMKINKNITDAKECFLINQSVTGLYENRIDLLRV

SEQ ID NO: 3071 - protein, 1175 aa, Unknown
  Description of Unknown: uncultivated organism sequence
  Category: MG91 effectors
  Description: MG91-263 effector
MEKEYYLGLDMGTNSVGWAVTDDAYNLIRFKGKDMWGIREFDEANPAVERRTHRTSRRREQRNAVRMGLIRSYFADEIQKVDSNFYQRLDNSFFHVEDKQDNVKDKNGIFNDKNYKDADYYKQYPTIFHLRKELIEDASQKDVRLVYLAVANMFKHRGHFLLSGIGSESSKQTITDLYNQVSGLITEEYGISLKTDIAVTDFEQVLCSREYSRTRKSEKVCEILEIKNSDKLKKAFVKSMCGLSVKITDIIDDTFTEISDEDKKITFSFVDSDYDEKAGVLEEKLGTDVYDIISKLKEIHDKAQVAEIMKNYQYLSFARVADYEKHKKDLKILKRVVKKYFEPTIYDKLFRSEENGTYSAYVNSFNSEEKSRRNYKERKQEDLYNSIKKLLKSVDNVYDTDIEYIKNEMDKENFLPKQLTFKNGVIPNQIHASELKAILKNAEKYLPFLNEKDESGYTVSERILMLFSFQIPYYVGPVSPNSNGWVKRLEPGQVLPWNIDKKIDLKETSEQFIQRMVRNCTYIAGEKVLPKASLLYENFKVLNEINNLSISGERIAVALKQDLYNTLFLKGKRVTRKQIFNYFHSRGLVEEDSQISGIDIAVNNSLSTYGKFLPLFGDHLKEDKYKKMVDDIVFWCTVYGDSRKFLREQLEEKYSDVLDENQIKRITGMKFKDWGNLSKEFLELSGCCKSTGEVMPLIRAMWETNYNLMELLHSEEFTYSEELEEKQGKIEKVLSEYTIDNLNEEYFSAPVKRMVWQTLLIIKEIEKIMKCPPTRIFVEMTRKDDEKGDNGRKSSRKDQLLALYKKIQSEDKEWKKEMSSRIEDYDKNGALRSKKLYLYFIQKGLDMYTGKPIDLDNLMSVNSNYDIDHIYPRHFVKDDNINNNLVLASKPANAEKSDIYPIKDSIYQKMKYTWKVLRDEGLITEEKYKRLTGRNPFTDEQKAGFIARQLVETGQGTKGVADLLTALLPDTKLVYSKAGNVSDFRKKYDIPKSRLINDFHHAHDAYLNIVVGNIYFTKFTSNPLNYIRKECSSKDNKYQYNLGNMYKWDVKRDGKTAWIAAKEGETGTIATVKKMLSRNTPTLTRLTIEGHGGIADATLYSHKKAKQDTYIPLKSSDARMADVTKYGGYSSVTTAYLFLVEHEIKGKKIRTLETVPIYLKDRLENSKEKLEEYCR

SEQ ID NO: 3072 - protein, 1352 aa, Unknown
  Description of Unknown: uncultivated organism sequence
  Category: MG91 effectors
  Description: MG91-264 effector
MTAFKYYLGLDMGTNSVGWAATDPEYRLLKAKGKDLWGIREFNEASGAVERRTHRISRRRRQREQVRIGILKDYFHDAICEVDPGFFQRLENSKYHEEDKDVEVRYKNNIFNDSNYTDKDYFNEYPTIYHLRNELISSTEKHDVRLVFLALLNMFKHRGHFLNAGLGENNGESNIDNAYFELTELLSELTEYHLSQDIDCKQIEAILSRRDMSRTHKAEELAGVLHVDLKNKPYKELIRGLCGLKFNACVVFPDVQSEEVTKLDICLSESTFDEKSDEIANIIGEDYFEIIMAMKEMFDIGSLASIMKGHNYLSQARVASYTKHKEDLKLLKEVIKKYCGKKEYDKFFNSDADGSYASYVGSYNSKNKERRVGNKRTSEELYKEIKKLLKDAQKEDENVQKILTSIENETFLPKQLTASNGVIPNQVHAREMKKILSNAENYLPFLTEKDETGLSVSERILKLFTFQIPYYVGPTSENSGKNGGNGWVVRREDGQVLPWNIDEKIDMKATSEAFISRMVRRCTYISGEQVLPKASLEYQSYCVLNEINNIKIDGERISVELKQDIYKAVFQKGKKVTKKQLCKYLHTRGIIETEEQVTGVDVSINNALTTYGKFKPIFGEDISKDSVQKMIEDIVFWCTVYGDSKKFLKDRIEEKYGNKLSEEQIKRILGFKFKDWGNLSKKFLELNGADTSTGESISIIRALWNNNLNLMELINSSLYNYKECLAEYQNTMLKTLSEIEAEDLNEYYFSAPVRRMIWQTILVIKELVKVLGCEPERIFVEMTRKPDEHKTRTSSRRNKFEELYKKVKDETTDWMQVIANAEEDGKIRSKKMYLYLTQKGRCMYTGKHIELDDLFDNNLYDIDHIYPRHFVKDDNIDNNLVLVCKEKNAHKSDHYPIEEEIFLSQKKMWLELRKSGFITEEKYNRLMDRNPFSDEQKAGFIARQLVETSQGTKGVANILRQLLPGSKIVYTKASNVSEFRCTRDDIQKSRLVNDFHHAHDAYLNIVVGNVYYVKFTQNPLNFIKKDYDKYKEDYNLSKMFDWDVKRNGEVAWIAQRKDGAAGTITTVKRMLSRNTPLMTRYSFDGKGGLTNETLYSAKKAKGEGYIPFKSSDDKMQDVTKYGGFTSVTGAYFFLVEHTEKKKRIRTIESVPVYLAQKIEQNPDELKKYCEEILGLIDADIRLKKIKIGSLIKRNGYFCYITGKTVNRLIVRNAVNLCLKNEWIKYISKLEKVKEKDAVDKIITKEKNEVLYSELIQKFKHGIFSKRPNPVGDKLEKDSEKFNNLSIKDQCAVLCQVLRMAAILGSECDMTLLGDSPNCGKMLISKKIGDEEIYLINQSVTGLYEKKINLHTV

SEQ ID NO: 3073 - protein, 1352 aa, Unknown
  Description of Unknown: uncultivated organism sequence
  Category: MG91 effectors
  Description: MG91-265 effector
MTAFKYYLGLDMGTNSVGWAATDPEYRLLKAKGKDLWGIREFNEASGAVERRTHRISRRRRQREQVRIGILKDYFHDAICEVDPSFFRRLENSKYHEEDKDVEVRYKNNIFNDGNYTDKDYFNEYPTIYHLRNELISSTEKHDVRLVFLALLNMFKHRGHFLNAGLGENNGESNIDNAYFELTELLSELTEYHLSQDIDCKQIEAILSRRDMSRTHKAEELAGVLHVDLKNKPYKELIRGLCGLKFNACVVFPDVQSEEVTKLDICLSESSFDEKSDEIANIIGEDYFEIIMAMKEMFDIGSLASIMKGHNYLSQARVASYTKHKEDLKLLKEVIKKYCGKKEYDKFFNSDADGSYASYVGSYNSKNKERRVGNKRTSEELYKEIKKLLKDAPKEDENVQKILTSIENETFLPKQLTASNGVIPNQVHAREMKKILSNAENYLPFLTEKDETGLSVSERILKLFTFQIPYYVGPTSENSGKNGGNGWVVRREDGQVLPWNIDEKIDMKATSEAFISRMVRRCTYISGEQVLPKASLEYQSYCVLNEINNIKIDGERISVELKQDIYKAVFQKGKKVTKKQLCKYLHTRGIIETEEQVTGVDVSINNALTTYGKFKPIFGEDISKDSVQKMIEDIVFWCTVYGDSKKFLKDRIEEKYGNKLSEEQIKRILGFKFKDWGNLSKKFLELNGADTSTGESISIIRALWNNNLNLMELINSSLYNYKECLAEYQNTMLKTLSEIEAEDLNEYYFSAPVRRMIWQTILVIKELVKVLGCEPERIFVEMTRKPDEHKTRTSSRRNKFEELYKKVKDETTDWMQVIANAEEDGKIRSKKMYLYLTQKGRCMYTGKHIELDDLFDNNLYDIDHIYPRHFVKDDNIDNNLVLVCKEKNAHKSDHYPIEEEIFLSQKKMWLELRKSGFITEEKYNRLMDRNPFSDEQKAGFIARQLVETSQGTKGVANILRQLLPGSKIVYAKASNVSEFRCTRDDIQKSRLVNDFHHAHDAYLNIVVGNVYYVKFTQNPLNFIKKDYDKYKEDYNLSKMFDWDVKRNGEVAWIAQRKDGAAGTITTVKRMLSRNTPLMTRYSFDGKGGLTNETLYSAKKAKGEGYIPFKSSDDKMQDVTKYGGFTSVTGAYFFLVEHTEKKKRIRTIESVPVYLAQKIEQNPDELKKYCEEILGLIDADIRLKKIKIGSLIKRNGYFCYITGKTVNRLIVRNAVNLCLKNEWIKYISKLEKVKEKDAVDKIITKEKNEVLYSELIQKFKHGIFSKRPNPVGDKLEKDSEKFNNLSIKDQCAVLCQVLRMAAILGSECDMTLLGDSPNCGKMLISKKIGDEEIYLINQSVTGLYEKKINLHTV

SEQ ID NO: 3074 - protein, 1364 aa, Unknown
  Description of Unknown: uncultivated organism sequence
  Category: MG91 effectors
  Description: MG91-266 effector
MEKEYYLGLDMGTSSVGWAVTDKEYRLLRAKGKDMWGIREFEEAQTAVERRTHRLSKRRRARQLVRIGLLKDYFHDEIMKIDPNFYIRLENSKYYLEDKDVRLASSNGIFDDKNYTDKDYYEQYKTIFHLRSELIHNSQKHDVRLVYLALLNMFKHRGHFLFEGDAYVQGNIGDIYKEFIQLLKNEYYEDENVKLTDQIDYFKLKEILSNSEFSRTAKAEKINSLVHIDKKNKLENTYIRLLCGLEIELKILFPEIDEKIKICFAKGYDEKLVEITEILTDNQLQILENLKKIHDIAALDKIRKGKEYLSDARVAEYEKHREDLALLKKIYREYMTKQDYDRMFREGEDGSYSAYVNSYNTSKKQRRNMKHRKIDEFYGTIRKDLKLLLKQGIQDDNIERILEEIDGNNDNKFMPKQLSFANGVIPNSLHKAEMKAILRNAETYLPFLLETDESGLTVSERILQLFSFHIPYYIGPVSVNSEKNNGNGWVVRREDGEVLPWNIEQKIDYGETSKRFIEKMVRRCTYISGEQVLPKNSFIYEKYCVLNEINNIKIDGERITVELKQNIYNDLYLHGKRVTKKQLINYLNNRGMIEDENQVSGIDINLNNYLGSYGKFLPIFEEKLKEDNYIKIAEDIIYLASIYGDSKKMLKSQIKSKYGDILDDKQIKRILGLKFKDWGRISRRFLELEGLDKETGEITTIIKAMWDYNLNFMEIIHSDAFDFKDKIEELHANSIKPLAEIEVEDLDDMYFSAPVKRMIWQTFKVIKEIEKVMGCPPKKVFIEMTRINDKKSKGKRTNSRKEKFLSLYKNIHDELVDWKQLIISSDESGKLNSKKMYLYLTQQGICMYTGRRINLEELFDDNKYDIDHIYPRHFVKDDNLENNLVLVEKQSNSRKSDTYPIDKSIRNNSQVYKHWKSLREGNFISKEKYDRLTGKNEFTDEQKAGFIARQMVETSQGTKGVADIIKQALPQSRIIYSKASNVSEFRRKYDILKSRTVNEFHHAHDAYLNIVVGNVYDTKFTSNPLNFIKKQYNVDRKANNYNLDKMFVYDVKRGNEIAWIGWNPKKSEDSSEMSKRGTIVTVKKMLSKNTPLMTRMSFVGHGGIAEDNLSSHFVAKNKGYMPNGKESDVTKYGGYKKAKTAYFFVVEHGQTNNRIRTIETLPIYRRREVEKYEDGLIKYCEQSLSLLNPIIIYKKIKIQSLMKINGYYAYISGKSNEVYTFRNGVNMCLSQEWINYVKKLENYIEKDRQDRMITYEKNIELYEIILRKYSTTILNKRLSKMDKKLINAKDRFCILNVKEQSQVLINVFVLSRIGDNQTDLSKIGIGKQSGQITQNKKITGCKEFKLVNQSVTGLYENEIDLLTV

SEQ ID NO: 3075 - protein, 1352 aa, Unknown
  Description of Unknown: uncultivated organism sequence
  Category: MG91 effectors
  Description: MG91-267 effector
MTAFKYYLGLDMGTNSVGWAATDPEYRLLKAKGKDLWGIREFNEASGAVERRTHRISRRRKQREQVRIGILKDYFHDAICEVDPSFFQRLENSKYHEEDKDVEVRYKNNIFNDSNYTDKDYFNEYPTIYHLRNELISSTEKHDVRLVFLALLNMFKHRGHFLNAGLGENNGESNIDNAYFELTELLSELTEYHLSQDIDCKQIEAILSRRDMSRTHKAEELAGVLHVDLKNKPYKELIRGLCGLKFNACVVFPDVQSEEVTKLDICLSESTFDEKSDEIANIIGEDYFEIIMAMKEMFDIGSLASIMKGHNYLSQARVASYTKHKEDLKLLKEVIKKYCGKKEYDKFFNSDADGSYASYVGSYNSKNKERRVGNKRTSEELYKEIKKLLKDAQKEDENVQKILTSIENETFLPKQLTASNGVIPNQVHAREMKKILSNAENYLPFLTEKDETGLSVSERILKLFTFQIPYYVGPTSENSGKNGGNGWVVRREDGQVLPWNIDEKIDMKATSEAFISRMVRRCTYISGEQVLPKASLEYQSYCVLNEINNIKIDGERISVELKQDIYKAVFQKGKKVTKKQLCKYLHTRGIIETEEQVTGVDVSINNALTTYGKFKPIFGEDISKDSVQKMIEDIVFWCTVYGDSKKFLKDRIEEKYGNKLSEEQIKRILGFKFKDWGNLSKKFLELNGADTSTGESISIIRALWNNNLNLMELINSSLYNYKECLAEYQNTMLKTLSEIEAEDLNEYYFSAPVRRMIWQTILVIKELVKVLGCEPERIFVEMTRRPDEHKTRTSSRRNKFEELYKKVKDETTDWMQVIANAEEDGKIRSKKMYLYLTQKGRCMYTGKHIELDDLFDNNLYDIDHIYPRHFVKDDNIDNNLVLVCKEKNAHKSDHYPIEEEIFLSQKKMWLELRKSGFITEEKYNRLMGRSPFSDEKKAGFIARQLVETSQGTKGVANILRQLLPGSKIVYAKASNVSEFRCTRDDIQKSRLVNDFHHAHDAYLNIVVGNVYYVKFTQNPLNFIKKDYDKYKEDYNLSKMFDWDVKRNGEVAWIAQRKDGAAGTITTVKRMLSRNTPLMTRYSFDGKGGLTNETLYSAKKAKGEGYIPFKSSDDKMQDVTKYGGFTSVTGAYFFLVEHTEKKKRIRTIESVPVYLAQKIEQNPDELKKYCEEILGLIDADIRLKKIKIGSLIKRNGYFCYITGKTVNRLIVRNAVNLCLKNEWIKYISKLEKVKEKDAVDKIITKEKNEVLYSELIQKFKHGIFSKRPNPVGDKLEKDSEKFNNLSIKDQCAVLCQVLRMAAILGSECDMTLLGDSPNCGKMLISKKIGDEEIYLINQSVTGLYEKKINLHTV

SEQ ID NO: 3076 - protein, 524 aa, Unknown
  Description of Unknown: uncultivated organism sequence
  Category: MG91 effectors
  Description: MG91-268 effector
MNEVFVLELPLQVEKYQADILNRRYEQLRQLYNYVQGKLLRQYRYFEQMKEYQACKTFKEKKDFLKNHPFQIKGVYGSNKELLDITFDEYGIQGFIEKLMHKPVGADMTYADLGINTYVLDRLSSSVWAAWEKKIYDYRAKRVSFKKYGELDSFSSRRKVSSGKIYFSGMELHLDTMELAVKTNGKVGKAAKFITLPILHNPKHADYEMWALKGGIDSVKVITVVRRLVRGQYKYYVQLSIEGEKPLKGRTLGKGNVGIDLGPTTVAISGNNNVSIDKLAPKCDNIQKEITKLSRKIDRSRRANNPQNFNEDGTIKRGIRLVWNDSKRYKALRRELAELQRRQAAIRKQQHIDRANELLKEGDTFIVENNSISGWATKAKETKVSEKTGKIQKKKRFGKSIANHAPAMFVNILENKVKSLGGQVVKVDTKNAASQYDFTDNSFEKHELNERNVTLSNGDTHQRDMLAAFNLQHLKYDAEESKQYDVEAMKEDYDRFCQLEKAEVMRYKNKEKKDDRSTIGAGKL

SEQ ID NO: 3077 - protein, 1352 aa, Unknown
  Description of Unknown: uncultivated organism sequence
  Category: MG91 effectors
  Description: MG91-269 effector
MTAFKYYLGLDMGTNSVGWAATDPEYRLLKAKGKDLWGIREFNEASGAVERRTHRISRRRRQREQVRIGILKDYFHDAICEVDPSFFRRLENSKYHEEDKDVEVRYKNNIFNYGNYTDKDYFNEYPTIYHLRNELISSTEKHDVRLVFLALLNMFKHRGHFLNAGLGENNGESNIDNAYFELTELLSELTEYHLSQDIDCKQIEAILSRRDMSRTHKAEELAGVLHVDLKNKPYKELIRGLCGLKFNACVVFPDVQSEEVTKLDICLSESTFDEKSDEIANIIGEDYFEINIAKKEMFDIGSLASIMKGHNYLSQARVASYTKHKEDLKLLKEVIKKYCGKKEYDKFFNSDADGSYASYVGSYNSKNKERRVGNKRTSEELYKEIKKLLKDAQKEDENVQKILTSIENETFLPKQLTASNGVIPNQVHAREMKKILSNAENYLPFLTEKDETGLSVSERILKLFTFQIPYYVGPTSENSGKNGGNGWVVRREDGQVLPWNIDEKIDMKATSEAFISRMVRRCTYISGEQVLPKASLEYQSYCVLNEINNIKIDGERISVELKQDIYKAVFQKGKKVTKKQLCKYLYTRGIIETEEQVTGVDVSINSALTTYGKFKPIFGEDISKDSVQKMIEDIVFWCTVYGDSRKFLKARIEEKYGNKLSEEQIKRILGFKFKDWGNLSKKFLELNGADTSTGESISIIRALWNNNLNLMELINSSLYNYKECLAEYQNTMLKTLSEIEAEDLNEYYFSAPVRRMIWQTILVIKELVKVLGCEPERIFVEMTRKPDEHKTRTSSRRNKFEELYKKVKDETTDWMQVIANAEEDGKIRSKKMYLYLTQKGRCMYTGKHIELDDLFDNNLYDIDHIYPRHFVKDDNIDNNLVLVCKEKNAHKSDHYPIEEEIFLSQKKMWLELRKSGFITEEKYNRLMDRNPFSDEQKAGFIARQLVETSQGTKGVANILRQLLPGSKIVYAKASNVSEFRHTRDDIPKSRLVNDFHHAHDAYLNIVVGNVYYVKFTQNPLNFIKKDYDNYKEDYNLSKMFDWDVKRNGEVAWIAQRKDGEAGTITTVKKMLSRNTPLMTRYSFEGKGGLANETLYSAKKAKGEGYIPFKSSDDKMQDVTKYGGFTKVAGAYFFLVEHTEKKKRIRTIESVPVYLTRKIEQKPGELKKYCDEILGLVDADIRLKKIKIGSLIKRNGYFCYITGKTGNQLSVRNAVNLCLKNEWIKYISKLEKVKEKDTIDKIITKEKNEVLYSELIQKFKHCIFSKRPNPVGDKLEKGSEKFSNLSIKEQCAVLCQILQLAAVLGSECDMTLLGESAHCGKMLISKKIGDEEIYLINQSVTGLYEKKINLHTV

SEQ ID NO: 3078 - protein, 1358 aa, Unknown
  Description of Unknown: uncultivated organism sequence
  Category: MG91 effectors
  Description: MG91-270 effector
MEKEYYLGLDMGTNSVGWAVTDDAYNLIRFKGKDMWGIREFDEANSAVERRTHRTSRRRKQRNAVRMGLIRSYFADEIQKVDSNFYQRLDNSFFHVEDKQDNVKDKNGIFNDKNYKDADYYKQYPTIFHLRKELIEDASQKDVRLVYLAVANMFKHRGHFLLSGIGSESSKQTITDLYNQVSGLITEEYGISLKTDIAGTDFEQVLCSREYSRTRKSEKVCEILEIKNSDKLKKAFVKSMCGLSVKITDIIDDTFTEISDEDKKITFSFVDSDYDEKAGVLEEKLGTDVYDIISKLKEIHDKAQVAEIMKNYQYLSFARVADYEKHKKDLKILKRVVKKYFEPTVYDKLFRSEENGTYSAYVNSFNSEEKSRRNYKERKQEDLYNSIKKLLKSVDNVDDTDIEYIKNEMDKENFLPKQLTFKNGVIPNQIHASELKAILKNAEKYLPFLNEKDESGYTVSERILMLFSFQIPYYVGPVSSNSNGWVKRLEPGQVLPWNIDKKIDLKETSEQFIQRMVRNCTYIAGEKVLPKASLLYENFKVLNEINNLSINGERITVNLKQDLYNTLFLKGKRVTRKQIFNYFHSRGLVEEDSQISGIDIAVNNSLSTYGKFLPLFGEHLKEDKYKKMVDDIVFWCTVYGDSRKFLREQLEEKYSDVLDENQIKRITGMKFKDWGNLSKEFLELSGCCKSTGEVMPLIRAMWETNYNLMELLHSEEFTYSEELEEKQGKIEKVLSEYTIDDLNEEYFSAPVKRMVWQTLLIIKEIEKIMKCPPTRIFVEMTRKDDEKGDNGRKSSRKDQLLALYKKIQSEDKEWKKEMSSRIEDYDKKGALRSKKLYLYFIQKGLDMYTGKPIDLDNLMSANSNYDIDHIYPRHFVKDDNINNNLVLASKPANAEKSDIYPIKDSIYQKMKYTWKVLRDEGLITEEKYKRLTGRNPFTDEQKAGFIARQLVETGQGTKGVADLLTALLPDTKLVYSKAGNVSDFRKKYDIPKSRLINDFHHAHDAYLNIVVGNIYFTKFTSNPLNYIRKECSSKDNKYQYNLGNMYKWDVKRDGKTAWIAAKEGETGTIATVKKMLSRNTPTLTRLTIEGHGGIADATLYSHKKAKQDAYIPLKSSDARMADVTKYGGYSSVTTAYLFLVEHEIKGKKIRTLETVPLYLKDRLENSKEKLEEYCRETLGYTNPSVRMKKIKLQSLIKLNGYYMQISGKTNKQFTVRNYVQFCLNSKWVDYIHKLEKYQDKGVIDDAITDEKNVELYNVLCEKHSVGIFTLRPNPVGDKIKKGYDKFVNLTTEEQIKLLIEIIKLTCVGIVSANLTLIGGASISGKMLISKNITDAKECLLINQSVTGLYENRIDLLRV

SEQ ID NO: 3079 - protein, 1358 aa, Unknown
  Description of Unknown: uncultivated organism sequence
  Category: MG91 effectors
  Description: MG91-271 effector
MEKEYYLGLDMGTNSVGWAVTDDAYNLIRFKGKDMWGIREFDEANPAVERRTHRTSRRREQRNAVRMGLIRSYFADEIQKVDSNFYQRLDNSFFHVEDKQDNVKDKNGIFNDKNYKDADYYKQYPTIFHLRKELIEDASQKDVRLVYLAVANMFKHRGHFLLSGIGSESSKQTITDLYNQVSGLITEEYGISLKTDIAGTDFEQVLCSREYSRTRKSEKVCEILEIKNSDKLKKAFVKSMCGLSVKITDVIDDTFTEISDEDKKITFSFVDSDYDEKAGVLEEKLGTDVYDIISKLKEIHDKAQVAEIMKNYQYLSFARVADYEKHKKDLKILKRVVKKYFEPTVYDKLFRSGENGTYSAYVNSFNSGEKSRRNYKERKQEDLYNSIKKLLKSIDNVCDTDIEYIKNEIEKENFLPKQLTFKNGVIPNQIHASELKAILKNAEKYLPFLNEKDESGYTVSERILMLFSFQIPYYVGPVSSNSNGWVKRLEPGQVLPWNIDKKIDLKETSEQFIQRMVRNCTYIAGEKVLPKASLLYENFKVLNEINNLSINGERIAVALKQDLYNTLFLKGKRVTRKQIFNYFHSRGLVEEDSQISGIDIAVNNSLSTYGKFLPLFGEHLKEDKYKKMVDDIVFWCTVYGDSRKFLREQLEEKYSDVLDENQIKRITGMKFKDWGNLSKEFLELLGCCKSTGEMIPLIRAMWETNYNLMELLHSEEFTYSEELEEKQGKIEKVLSEYTIDDLNEEYFSAPVKRMVWQTLLIIKEIEKIMKCPPTRIFVEMTRKDDEKGDNGRKSSRKDQLLALYKKIQSEDKEWKKEMSSRIEDYDKNGALRSKKLYLYFIQKGLDMYTGKPIDLDNLMSANSNYDIDHIYPRHFVKDDNINNNLVLASKPANAEKSDIYPIKDSIYQKMKYTWKVLRDEGLITEEKYKRLTGRNPFTDEQKAGFIARQLVETGQGTKGVADLLTALLPDTKLVYSKAGNVSDFRKRYDIHKSRLINDFHHAHDAYLNIVVGNIYFTKFTSNPLNYIRKECSSKDNKYQYNLGNMYKWDVKRDGKTAWIAAKEGETGTLATVKKMLSRNTPILTRLAIEGHGGIADATLYSHKKAKQDAYIPLKSSDARMADVTKYGGYSSVTTAYLFLVEHEIKGKKIRTLETVPLYLKDRLENSKEKLEEYCRETLGYTNPSVRMKKIKLQSLIKLNGYYMQISGKTNKQFTVRNYVQFCLNSKWVDYIHKLEKYQDKGVIDDAITDEKNVELYNVLCEKHSVGIFTLRPNPVGDKIKKGYDKFVNLTTEEQIKLLIEIIKLTCVGIVSANLTLIGGASISGKMLISKNITDAKECLLINQSVTGLYENRIDLLRV

SEQ ID NO: 3080 - protein, 1358 aa, Unknown
  Description of Unknown: uncultivated organism sequence
  Category: MG91 effectors
  Description: MG91-272 effector
MEKEYYLGLDMGTNSVGWAVTDDAYNLIRFKGKDMWGIREFDEANPAVERRTHRTSRRREQRNAVRMGLIRSYFADEIQKVDSNFYQRLDNSFFHVEDKQDNVKDKNGIFNDKNYKDADYYKQYPTIFHLRKELIEDDSQKDVRLVYLAVANMFKHRGHFLLSGIGSESSKQTITDLYNQVSGLITEEYGISLKTDIAGTDFEQVLCSREYSRTRKSEKVCEILEIKNSDKLKKAFVKSMCGLSVKITDIIDDTFTEISDEDKKITFSFVDSDYDEKAGVLEEKLGTDVYDIISKLKEIHDKAQVAEIMKNYQYLSFARVADYEKHKKDLKILKRVVKKHFEPTVYDKLFRSEENGTYSAYVNSFNSGEKSRRNYKERKQEDLYNSIKKLLKSVDNVYDTDIEYIKNEMDKENFLPKQLTFKNGVIPNQIHASELKAILKNAEKYLPFLNEKDESGYTVSERILMLFSFQIPYYVGPVSSNSNGWVKRLESGQVLPWNIDKKIDLKETSEQFIQRMVRNCTYIAGEKVLPKASLLYENFKVLNEINNLSINGERITVNLKQDLYNTLFLKGKRVTRKQIFNYFHSRGLVEEDSQISGIDIAVNNSLSTYGKFLPLFGEHLKEDKYKKMVDDIVFWCTVYGDSRKFLREQLEEKYSDVLDENQVKRITGMKFKDWGNLSKEFLELSGCCKSTGEVMPLIRAMWETNYNLMELLHSEEFTYSEELEEKQGKIEKVLSEYTIDDLNEEYFSAPVKRMVWQTLLIIKEIEKIMKCPPTRIFVEMTRKDDEKGDNGRKSSRKDQLLALYKKIQSEDKEWKKEMSSRIEDYDKKGALRSKKLYLYFIQKGLDMYTGKPIDLDNLMSANSNYDIDHIYPRHFVKDDNINNNLVLASKPANAEKSDIYPIKDSIYQKMKYTWKVLRDEGLITEEKYKRLTGRNPFTDEQKAGFIARQLVETGQGTKGVADLLTALLPDTKLVYSKAGNVSDFRKRYDIPKSRLINDFHHAHDAYLNIVVGNIYFTKFTSNPLNYIRKECSSKDNKYQYNLGNMYKWDVKRDGKTAWVAPEEGETGTLATVKKMLSRNTPILTRLTIEGHGGIADATLYSHKKAKQDTYIPLKSSDARMADVTKYGGYSSVTTAYLFLVEHEIKGKKIRTLETVPIYLKDRLENSKEKLEEYCRETLGYTNPSVRMKKIKLQSLIKLNGYYMQISGRTGNRFTLRNYVQLCLNGKWVDYIHKLEKYQDKGVIDDLITDERNVELYNVLCEKHSVGIFTLRPNLVGDKIKNGYDKFVNLTTEEQIKLLIEIIKLTCVGIVSANLTLIGGAAISGKMLMSKNITYANECILINQSVTGLYENRIDLLRV

SEQ ID NO: 3081 - protein, 1358 aa, Unknown
  Description of Unknown: uncultivated organism sequence
  Category: MG91 effectors
  Description: MG91-273 effector
MEKEYYLGLDMGTNSVGWAVTDDAYNLIRFKGKDMWGIREFDEANPAVERRTHRTSRRREQRNAVRMGLIRSYFADEIQKVDSNFYQRLDNSFFHVEDKQDNVKDKNGIFNDKNYKDADYYKQYPTIFHLRKELIEDASQKDVRLVYLAVANMFKHRGHFLLSGIGSESSKQTITDLYNQVSGLITEEYGISLKTDIAGTDFEQVLCSREYSRTRKSEKVCEILEIKNSDKLKKAFVKSMCGLSVKITDVIDDTFTEISDEDKKITFSFVDSDYDEKAGVLEEKLGTDVYDIISKLKEIHDKAQVAEIMKNYQYLSFARVADYEKHKKDLKILKRVVKKYFEPTVYDKLFRSGENGTYSAYVNSFNSGEKSRRNYKERKQEDLYNSIKKLIKSIDNVCDTDIEYIKNEIEKENFLPKQLTFKNGVIPNQIHASELKAILKNAEKYLPFLNEKDESGYTVSERILMLFSFQIPYYVGPVSSNSNGWVKRLEPGQVLPWNIDKKIDLKETSEQFIQRMVRNCTYIAGEKVLPKASLLYENFKVLNEINNLSINGERIAVALKQDLYNTLFLKGKRVTRKQIFNYFHSRGLVEEDSQISGIDIAVNNSLSTYGKFLPLFGEHLKEDKYKKMVDDIVFWCTVYGDSRKFLREQLEEKYSDVLDENQIKRITGMKFKDWGNLSKEFLELSGCCKSTGEMIPLIRAMWETNYNLMELLHSEEFTYSEELEEKQGKIEKVLSEYTIDDLNEEYFSAPVKRMVWQTLLIIKEIEKIMKCPPTRIFVEMTRKDDEKGDNGRKSSRKDQLLALYKKIQSEDKEWKKEMSSRIEDYDKNGALRSKKLYLYFIQKGLDMYTGKPIDLDNLMSANSNYDIDHIYPRHFVKDDNINNNLVLASKPANAEKSDIYPIKDSIYQKMKYTWKVLRDEGLITEEKYKRLTGRNPFTDEQKAGFIARQLVETGQGTKGVADLLTALLPGTKLVYSKAGNVSDFRKKYDIPKSRLINDFHHAHDAYLNIVVGNIYFTKFTSNPLNYIRKECSSKDNKYQYNLGNMYKWDVKRDGKTAWIAAKEGETGTLATVKKMLSRNTPILTRLAIEGHGGIADATLYSHKKAKQDAYIPLKSSDARMADVTKYGGYSSVTTAYLFLVEHEIKGKKIRTLETVPLYLKDRLENSKEKLEEYCRETLGYTNPSVRMKKIKLQSLIKLNGYYMQISGKTNKQFTVRNYVQFCLNSKWVDYIHKLEKYQDKGVIDDAITDEKNVELYNVLCEKHSVGIFTLRPNPVGDKIKKGYDKFVNLTTEEQIKLLIEIIKLTCVGIVSANLTLIGGASISGKMLISKNITDAKECLLINQSVTGLYENRIDLLRV

SEQ ID NO: 3082 - protein, 1352 aa, Unknown
  Description of Unknown: uncultivated organism sequence
  Category: MG91 effectors
  Description: MG91-274 effector
MTAFKYYLGLDMGTNSVGWAATDPEYRLLKAKGKDLWGIREFNEASGAVERRTHRISRRRRQREQVRIGILKDYFHDAICEVDPSFFRRLENSKYHEEDKDVEVRYKNNIFNDGNYTDKDYFNEYPTIYHLRNELISSTEKHDVRLVFLALLNMFKHRGHFLNAGLGENNGESNIDNAYFELTELLSELTEYHLSQDIDCKQIEAILSRRDMSRTHKAEELAGVLHVDLKNKPYKELIRGLCGLKFNACVVFPDVQSEEVTKLDICLSESSFDEKSDEIANIIGEDYFEIIMAMKEMFDIGSLASIMKGHNYLSQARVASYTKHKEDLKLLKEVIKKYCGKKEYDKFFNSDADGSYASYVGSYNSKNKERRVGNKRTSEELYKEIKKLLKDAPKEDENVQKILTSIENETFLPKQLTASNGVIPNQVHAREMKKILSNAENYLPFLTEKDETGLSVSERILKLFTFQIPYYVGPTSENSGKNGGNGWVVRREDGQVLPWNIDEKIDMKATSEAFISRMVRRCTYISGEQVLPKASLEYQSYCVLNEINNIKIDGERISVELKQDIYKAVFQKGKKVTKKQLCKYLHTRGIIETEEQVTGVDVSINNALTTYGKFKPIFGEDISKDSVQKMIEDIVFWCTVYGDSKKFLKDRIEEKYGNKLSEEQIKRILGFKFKDWGNLSKKFLELNGADTSTGESISIIRALWNNNLNLMELINSSLYNYKECLAEYQNTMLKTLSEIEAEDLNEYYFSAPVRRIIWQTILVIKELVKVLGCEPERIFVEMTRKPDEHKTRTSSRRNKFEELYKKVKDEATDWMQVIAKAEEDGKIRSKKMYLYLTQKGRCMYTGKHIELDDLFDKNLYDIDHIYPRHFVKDDNIDNNLVLVCKEKNAHKSDHYPIEEEIFLSQKKMWLELRKSGFITEEKYNRLMGRSPFSDEKKAGFIARQLVETSQGTKGVANILRQLLPGSKIVYAKASNVSEFRHTRDDIPKSRLVNDFHHAHDAYLNIVVGNVYYVKFTQNPLNFIKKDYDKYKEDYNLSKMFDWDVKRNGEVAWIAQRKDGEAGTITTVKRMLSRNTPLMTRYSFEGKGGLANETLCSAKKAKGEGYIPFKSSDDKMQDVTKYGGFTKVTGAYFFLVEHTEKKKRIRTIESVPVYLAQKIEQNPDELKKYCEEILGLVDADIRLKKIKIGSLIKRNGYFCYITGKTGNRLSVRNAVNLCLKNEWIKYISKLEKVKEKDAVDEIITKEKNEVLYSELIQKFKHGIFSKRPNPVEDKLEKGSEKFSNLSIKEQCAVLCQILQLAAVLGSECDMTLLGESAHCGKMLISKKIGDEEIYLLNQSVTGLYEKKINLHTV

SEQ ID NO: 3083 - protein, 1342 aa, Unknown
  Description of Unknown: uncultivated organism sequence
  Category: MG91 effectors
  Description: MG91-275 effector
MRYFMGLDMGTSSVGWAVTDEHYQLLRRKGKDMWGIREFEEAATAVERRTHRVSRRRRQRQVARIGLLQEYFHDAIHQVDPNFYQRLKNSKYHEEDKDEIVRESNGIFNDAEYTDKEYFKEFPTIFHLRQELIKSKEPHDVRLVYLALLNMFKHRGHFLNATLSADGESRKIKDIYTDFVDKAAEQLGVSFATDIRYEELENYLSSNDLSRKRKGELIAELLHVTRKDKQQYALIECMLGLDKSVKLMFGDTLPEDFDKTIKVNFSDIAFEEKATEISEAIGEEKYDLILIMKEIYDAAILNRIMNGYTYLSDARVAEYEKHKSDLACLKHYIKEYGTQHQFDFLFRGTEKGSYSAYVHSVNSHEKQRRNMDGNKKEDLYSTLKKILKDMPENEEKTYIMMQIELDNFLPKQLTASNGVIPNQIHLKEMKKILANAENYLPFLKEKDESGYTVSERIQKLFAFQIPYYIGPTTEKSAEFGGNGWVVRKEEGKVLPWNIDQKIDMKKTSEKFISRMVRRCTYMNDEQVLPKESLEYESFCVLNELNNIKVYGEKLPVDIKQDIYRTLCEKGKRVTKKSLMQYLVGRGVIKAEDEEQLTGLMDGLNNTLKSFAKFKAIFGDAIYEDSCKKMVEQIIFWCTVYGDSKHFLKEQLLEKYGEVLTDAQIKRILGIKFRDWGNLSKKFLELQGCSKETGEVNSLIRMLWETNDNLMELLAQDSYTFKEELENMQESTYKVLTELQPEDLDHMYFSAPVKRMIWQTILIIKEVTKVMGCQPERLFIEMTREHGQKNDIKDSRAKKFYELYSKIKDEDKDWRKVIEDADKDGRIRSKKMYLYLTQMGRCMYTGRPIDLDQLFNNNLYDIDHIYPRHYVKDDNLENNMVLVEKQSNAHKSDVYPLESGIYEKQVNWWRELHRKNLINDEKLKRLTGRNPFTDEQKAGFIARQLVETSQGTKGVATILQEALPDTTLVYAKARNVSEFRSDNDLLKSRIVNDFHHAHDAYLNIVIGNVYYVKFTKNPINFIREHGTYNLGKMFAKDVKRGDDIGWVAQSGNGQTATMETIKRTMARNTPLLTRMSYEVTGGLANQTLYSASKAKEGTYIPLKSSDERMQDVTKYGGFTSVSTAYFMLVEHDGKKGKRIRTIESVPIMWKERIEKNPAELERYCLEVLKLSNPDIRVRKILIQSLIKRNGYYMQITGKTGNQLYVRNTVSLCLKQEWVNYIKKLEKGNDENITKDKNLVLYDILVDKHNNTIYSQRPNPVGEKLVKRREEFINLNLNDQVTVLLEILKLTQIALGGANLELINESKTTGSMKISKTVSEEREVTLINQSVTGLYEQRVNLLTV

SEQ ID NO: 3084 - protein, 1342 aa, Unknown
  Description of Unknown: uncultivated organism sequence
  Category: MG91 effectors
  Description: MG91-276 effector
MRYFMGLDMGTSSVGWAVTDEHYQLLRRKGKDMWGIREFEEAATAVERRTHRVSRRRRQRQVARIGLLQEYFHDAIHQVDPNFYQRLKNSKYHEEDKDEIVRESNGIFNDAEYTDKEYFKEFPTIFHLRQELIKSKEPHDVRLVYLALLNMFKHRGHFLNATLSADGESRKIKDIYTDFVDKAAEQLGVSFATDIRYEELENYLSSNDLSRKRKGELIAELLHVTRKDKQQYALIECMLGLDKSVKLMFGDTLPEDFDKTIKVNFSDIAFEEKATEISEAIGEEKYDLILIMKEIYDAAILNRIMNGYTYLSDARVAEYEKHKSDLACLKHYIKEYGTQQQFDFLFRGTEKGSYSAYVHSVNSHEKQRRNMAGNKKEDLYSALKKMLKDMPENEEKTCIMMQIELDNFLPKQLTASNGVIPNQIHLKEMKKILANAENYLPFLKEKDESGYTVSERIQKLFAFQIPYYIGPTTEKSAEFGGNGWVVRKEEGKVLPWNIDQKIDMKKTSEKFISRMVRRCTYMNDEQVLPKESLVYESFCVLNELNNIKVYGEKLPVDIKQDIYRTLCEKGKRVTKKSLMQYLVGRGVIKAEDEEQLTGLMDGLNNTLKSFAKFKAIFGDAIYEDSCKKMVEQIIFWCTVYGDSKHFLKEQLLEKYGEVLTGAQIKRILGIKFRDWGNLSKKFLELQGCSKETGEVNSLIRMLWETNDNLMELLAQDSYTFKEELENMQESTYKVLTELQPEDLDHMYFSAPVKRMVWQTILIIKEVTKVMGCQPERLFIEMTREHGQKNDIKDSRAKKFYELYSKIKDEDKDWRKVIEDADKDGRIRSKKMYLYLTQMGRCMYTGRPIDLDQLFNNNLYDIDHIYPRHYVKDDNLENNMVLVEKQSNAHKSDVYPLESGIYEKQVNWWRELHRKNLINDEKLKRLTGRNPFTDEQKAGFIARQLVETSQGTKGVATILQEALPDTTLVYAKARNVSEFRSDNDLLKSRIVNDFHHAHDAYLNIVIGNVYYVKFTKNPINFIREHGTYNLGKMFAKDVKRGDDIGWVAQSGNGQTATMETIKRTMARNTPLLTRMSYEVTGGLANQTLYSASRAKEGTYIPLKSSDERMQDVTKYGGFTSVSTAYFMLVEHDGKKGKRIRTIESVPIMWKERIEKNPAELERYCLDVLKLSNPDIRVRKILIQSLIKRNGYYMQITGKTGNRMYVRNMVSLCLVQDWVNYIKKLEKDKDENISKEKNIRLYDVLMDKHINTIYNTRPNPVGDLLIKRRSDFIELKITDQVIILLEILKLTQTALGSANLKLIGEAEKTGVMLISKDITALDEMLLINQSVTGLYEQRVNLLTV

SEQ ID NO: 3085 - protein, 1342 aa, Unknown
  Description of Unknown: uncultivated organism sequence
  Category: MG91 effectors
  Description: MG91-277 effector
MRYFMGLDMGTSSVGWAVTDEHYQLLRRKGKDMWGIREFEEAATAVERRTHRVSRRRRQRQVARIGLLQEYFHDAIHQVDPNFYQRLKNSKYHEEDKDEIVRGSNGIFNDVEYTDKEYFKEFPTIFHLRQELIKSKEPHDVRLVYLALLNMFKHRGHFLNATLSADGESRKIKDIYTDFVDKVAEQLGVSFATDIRYEELENYLSSNDLSRKRKGELIAELLHVTRKDKQQYALIECMLGLDKSVKLMFGDTLPEDFDKTIKVNFSDIAFEEKATEISEAIGEEKYDLILIMKEIYDAAILNRIMNGYTYLSDARVAEYEKHKSDLACLKHYIKEYGTQHQFDFLFRGTEKGSYSAYVHSVNSHEKQRRNMDGNKKEDLYSTLKKILKDMPENEEKTYIMMQIELDNFLPKQLTASNGVIPNQIHLKEMKKILANAENYLPFLKEKDESGYTVSERIQKLFAFQIPYYIGPTTEKSAEFGGNGWVVRKEEGKVLPWNIDQKIDMKKTSEKFISRMVRRCTYMNDEQVLPKESLEYESFCVLNELNNIKVYGEKLPVDIKQDIYRTLCEKGKRVTKKSLMQYLVGRGVIKAEDEEQLTGLMDGLNNTLKSFAKFKAIFGDAIYEDSCKKMVEQIIFWCTVYGDSKHFLKEQLLEKYGEVLTGAQIKRILGIKFRDWGNLSKKFLELQGCSKETGEVNSLIRMLWETNDNLMELLAQDSYTFKEELENMQESAYKVLTELQPEDLDHMYFSAPVKRMIWQTILIIKEVTKVMGCQPERLFIEMTREHGQKNDIKDSRAKKFYELYSKIKDEDKDWRKVIEDADKDGRIRSKKMYLYLTQMGRCMYTGRPIDLDQLFNNNLYDIDHIYPRHYVKDDNLENNMVLVEKQSNAHKSDVYPLESGIYEKQVNWWRELHRKNLINDEKLKRLTGRNPFTDEQKAGFIARQLVETSQGTKGVATILQEALPDTTLVYAKARNVSEFRSDNDLLKSRIVNDFHHAHDAYLNIVIGNVYYVKFTKNPINFIREHGTYNLGKMFAKDVKRGDDIGWVAQSGNGQTATMETIKRTMARNTPLLTRMSYEVTGGLANQTLYSASKAKEGTYIPLKSSDERMQDVTKYGGFTSVSTAYFMLVEHDGKKGKRIRTIESVPIMWKERIEKNPAELERYCLDVLKLSNPDIRVRKILIQSLIKRNGYYMQITGKTGNQLYVRNTVSLCLKQEWVNYIKKLEKGNDENITKDKNLVLYDILVDKHNNTIYSQRPNPVGEKLVKRREEFINLNLNDQVTVLLEILKLTQIALGGANLKLIGEAEKTGVMLISKDITTLDEMLLINQSVTGLYEQKVNLLTV

SEQ ID NO: 3086 - protein, 1342 aa, Unknown
  Description of Unknown: uncultivated organism sequence
  Category: MG91 effectors
  Description: MG91-278 effector
MRYFMGLDMGTSSVGWAVTDEHYQLLRRKGKDMWGIREFEEAATAVERRTHRVSRRRRQRQVARIGLLQEYFHDAIHQVDPNFYQRLKNSKYHEEDKDEIVRESNGIFNDAEYTDKEYFKEFPTIFHLRQELIKSKEPHDVRLVYLALLNMFKHRGHFLNATLSADGESRKIKDIYTDFVDKAAEQLGVSFATDIRYEELENYLSSNDLSRKRKGELIAELLHVTRKDKQQYALIECMLGLDKSVKLMFGDTLPEDFDKTIKVNFSDIAFEEKATEISEAIGEEKYDLILIMKEIYDAAILNRIMNGYTYLSDARVAEYEKHKSDLACLKHYIKEYGTQQQFDFLFRGTEKGSYSAYVHSVNSHEKQRRNMAGNKKEDLYSALKKMLKDMPENEEKTCIMMQIELDNFLPKQLTASNGVIPNQIHLKEMKKILANAENYLPFLKEKDESGYTVSERIQKLFAFQIPYYIGPTTEKSAEFGGNGWVVRKEEGKVLPWNIDQKIDMKKTSEKFISRMVRRCTYMNDEQVLPKESLEYESFCVLNELNNIKVYGEKLPVDIKQDIYRTLCEKGKRVTKKSLMQYLVGRGVIKAEDEEQLTGLMDGLNNTLKSFAKFKAIFGDAIYEDSCKKMVEQIIFWCTVYGDSKHFLKEQLLEKYGEVLTGAQIKRILGIKFRDWGNLSKKFLELQGCSKETGEVNSLIRMLWETNDNLMELLAQDSYTFKEELENMQASTYKVLTELQPEDLDHMYFSAPVKRMIWQTILIIKEVTKVMGCQPERLFIEMTREHGQKNDIKDSRAKKFYELYSKIKDEDKDWRKVIEDADKDGRIRSKKMYLYLTQMGRCMYTGRPIDLDQLFNNNLYDIDHIYPRHYVKDDNLENNMVLVEKQSNAHKSDVYPLESGIYEKQVNWWRELHRKNLINDEKLKRLTGRNPFTDEQKAGFIARQLVETSQGTKGVATILQEALPDTTLVYAKARNVSEFRSDNDLLKSRIVNDFHHAHDAYLNIVIGNVYYVKFTKNPINFIREHGTYNLGKMFAKDVKRGDDIGWVAQSGNGQTATMETIKRTMARNTPLLTRMSYEVTGGLANQTLYSASKAKEGTYIPLKSSDERMQDVTKYGGFTSVSTAYFMLVEHDGKKGKRIRTIESVPIMWKERIEKNPAELERYCLDVLKLSNPDIRVRKILIQSLIKRNGYYMQITGKTGNRMYVRNMVSLCLVQDWVNYIKKLEKDKDENISKEKNIRLYDVLMDKHINTIYNTRPNPVGDLLIKRRSDFIELKITDQVIILLEILKLTQTALGSANLKLIGEAEKTGVMLISKDITALDEMLLINQSVTGLYEQRVNLLTV

SEQ ID NO: 3087 - protein, 1342 aa, Unknown
  Description of Unknown: uncultivated organism sequence
  Category: MG91 effectors
  Description: MG91-279 effector
MRYFMGLDMGTSSVGWAVTDEHYQLLRRKGKDMWGIREFEEAATAVERRTHRVSRRRRQRQVARIGLLQEYFHDAIHQVDPNFYQRLKNSKYHEEDKDEIVRESNGIFNDAEYTDKEYFKEFPTIFHLRQELIKSKEPHDVRLVYLALLNMFKHRGHFLNATLSADGESRKIKDIYTDFVDKAAEQLGVSFATDIRYEELENYLSSNDLSRKRKGELIAELLHVTRKDKQQYALIECMLGLDKSVKLMFGDTLPEDFDNTIKVNFSDIAFEEKATEISEAIGEEKYDLILIMKEIYDAAILNRIMNGYTYLSDARVAEYEKHKSDLACLKHYIKEYGTQQQFDFLFRGTEKGSYSAYVHSVNSHEKQRRNMAGNKKEDLYSALKKMLKDMPENEEKTCIMMQIELDNFLPKQLTASNGVIPNQIHLKEMKKILANAENYLPFLKEKDESGYTVSERIQKLFAFQIPYYIGPTTEKSAEFGGNGWVVRKEEGKVLPWNIDQKIDMKKTSEKFISRMVRRCTYMNDEQVLPKESLEYESFCVLNELNNIKVYGEKLPVDIKQDIYRTLCEKGKRVTKKSLMQYLVGRGVIKAEDEEQLTGLMDGLNNTLKSFAKFKAIFGDAIYEDSCKKMVEQIIFWCTVYGDSKHFLKEQLLEKYGEVLTGAQIKRILGIKFRDWGNLSKKFLELQGCSKETGEVNSLIRMLWETNDNLMELLAQDSYTFKEELENMQESTYKVLTELQPEDLDHMYFSAPVKRMIWQTILIIKEVTKVMGCQPERLFIEMTREHGQKNDIKDSRAKKFYELYSKIKDEDKDWRKVIEDADKDGRIRSKKMYLYLTQMGRCMYTGRPIDLDQLFNNNLYDIDHIYPRHYVKDDNLENNMVLVEKQSNAHKSDVYPLESGIYEKQVNWWRELHRKNLINDEKLKRLTGRNPFTDEQKAGFIARQLVETSQGTKGVATILQEALPDTTLVYAKARNVSEFRSDNDLLKSRIVNDFHHAHDAYLNIVIGNVYYVKFTKNPINFIREHGTYNLGKMFAKDVKRGDDIGWVAQSGNGQTATMETIKRTMARNTPLLTRMSYEVTGGLANQTLYSASKAKEGTYIPLKSSDERMQDVTKYGGFTSVSTAYFMLVEHDGKKGKRIRTIESVPIMWKERIEKNPAELERYCLDVLKLSNPDIRVRKILIQSLIKRNGYYMQITGKTGNQLYVRNTVSLCLKQEWVNYIKKLEKGNDENITKDKNLVLYDILVDKHNNTIYSQRPNPVGEKLVKRREEFINLNLNDQVTVLLEILKLTQIALGGANLKLIGEAEKTGVMLISKDITTLDEMLLINQSVTGLYEQKVNLLTV

SEQ ID NO: 3088 - protein, 1342 aa, Unknown
  Description of Unknown: uncultivated organism sequence
  Category: MG91 effectors
  Description: MG91-280 effector
MRYFMGLDMGTSSVGWAVTDEHYQLLRRKGKDMWGIREFEEAATAVERRTHRVSRRRRQRQVARIGLLQEYFHDAIHQVDPNFYQRLKNSKYHEEDKDEIVRESNGIFNDAEYTDKEYFKEFPTIFHLRQELIKSKEPHDVRLVYLALLNMFKHRGHFLNATLSADGESRKIKDIYTDFVDKAAEQLGVSFATDIRYEELENYLSSNDLSRKRKGELIAELLHVTRKDKQQYALIECMLGLDKSVKLMFGDTLPEDFDKTIKVNFSDIAFEEKATEISEAIGEEKYDLILIMKEIYDAAILNRIMNGYTYLSDARVAEYEKHKSDLACLKHYIKEYGTQQQFDFLFRGTEKGSYSAYVHSVNSHEKQRRNMAGNKKEDLYSALKKMLKDMPENEEKTCIMMQIELDNFLPKQLTASNGVIPNQIHLKEMKKILANAENYLPFLKEKDESGYTVSERIQKLFAFQIPYYIGPTTEKSAEFGGNGWVVRKEEGKVLPWNIDQKIDMKKTSEKFISRMVRRCTYMNDEQVLPKESLEYESFCVLNELNNIKVYGEKLPVDIKQDIYRTLCEKGKRVTKKSLMQYLVGRGVIKAEDEEQLTGLMDGLNNTLKSFAKFKAIFGDAIYEDSCKKMVEQIIFWCTVYGDSKHFLKEQLLEKYGEVLTGAQIKRILGIKFRDWGNLSKKFLELQGCSKETGEVNSLIRMLWETNDNLMELLAQDSYTFKEELENMQESTYKVLTELQPEDLDHMYFSAPVKRMIWQTILIIKEVTKVMGCQPERLFIEMTREHGQKNDIKDSRAKKFYELYSKIKDEDKDWRKVIEDADKDGRIRSKKMYLYLTQMGRCMYTGRPIDLDQLFNNNLYDIDHIYPRHYVKDDNLENNMVLVEKQSNAHKSDVYPLESGIYEKQVNWWRELHRKNLINDEKLKRLTGRNPFTDEQKAGFIARQLVETSQGTKGVATILQEALPDTTLVYAKARNVSEFRSDNDLLKSRIVNDFHHAHDAYLNIVIGNVYYVKFTKNPINFIREHGTYNLGKMFAKDVKRGDDIGWVAQSGNGQTATMETIKRTMARNTPLLTRMSYEVTGGLANQTLYSASKAKEGTYIPLKSSDERMQDVTKYGGFTSVSTAYFMLVEHDGKKGKRIRTIESVPIMWKERIEKNPAELERYCLDVLKLSNPDIRVRKILIQSLIKRNGYYMQITGKTGNQLYVRNTVSLCLKQEWVNYIKKLEKGNDENITKDKNLVLYDILVDKHNNTIYSQRPNPVGEKLVKRREEFINLNLNDQVTVLLEILKLTQIALGGANLKLIGEAEKTGVMLISKDITTLDEMLLINQSVTGLYEQKVNLLTV

SEQ ID NO: 3089 - protein, 1342 aa, Unknown
  Description of Unknown: uncultivated organism sequence
  Category: MG91 effectors
  Description: MG91-281 effector
MRYFMGLDMGTSSVGWAVTDEHYQLLRRKGKDMWGIREFEEAATAVERRTHRVSRRRRQRQVARIGLLQEYFHDAIHQVDPNFYQRLKNSKYHEEDKDEIVRESNGIFNDAEYTDKEYFKEFPTIFHLRQELIKSKEPHDVRLVYLALVNMFKHRGHFLNATLSADGESRKIKDIYTDFVDKAAEQLGVSFATDIRYEELENYLSSNDLSRKRKGELIAELLHVTRKDKQQYALIECMLGLDKSVKLMFGDTLPEDFDKTIKVNFSDIAFEEKATEISEAIGEEKYDLILIMKEIYDAAILNRIMNGYTYLSDARVAEYEKHKSDLACLKHYIKEYGTQQQFDFLFRGTEKGSYSAYVHSVNSHEKQRRNMAGNKKEDLYSALKKMLKDMPENEEKTCIMMQIELDNFLPKQLTASNGVIPNQIHLKEMKKILANAENYLPFLKEKDESGYTISERIQKLFAFQIPYYIGPTTEKSAEFGGNGWVVRKEEGKVLPWNIDQKIDMKKTSEKFISRMVRRCTYMNDEQVLPKESLEYESFCVLNELNNIKVYGEKLPVDIKQDIYRTLCEKGKRVTKKSLMQYLVGRGVIKAEDEEQLTGLMDGLNNTLKSFAKFKAIFGDAIYEDSCKKMVEQIIFWCTVYGDSKHFLKEQLLEKYGEVLTDAQIKRILGIKFRDWGNLSKKFLELQGCSKETGEVNSLIRMLWETNDNLMELLAQDSYTFKEELENMQESTYKVLTELQPEDLDHMYFSAPVKRMIWQTILIIKEVTKVMGCQPERLFIEMTREHGQKNDIKDSRAKKFYELYSKIKDEDKDWRKVIEDADKDGRIRSKKMYLYLTQMGRCMYTGRPIDLDQLFNNNLYDIDHIYPRHYVKDDNLENNMVLVEKQSNAHKSDVYPLESGIYEKQVNWWRELHRKNLINDEKLKRLTGRNPFTDEQKAGFIARQLVETSQGTKGVATILQEALPDTTLVYAKARNVSEFRSDNDLLKSRIVNDFHHAHDAYLNIVIGNVYYVKFTKNPINFIREHGTYNLGKMFAKDVKRGDDIGWVAQSGNGQTATMETIKRTMARNTPLLTRMSYEVTGGLANQTLYSASKAKEGTYIPLKSSDERMQDVTKYGGFTSVSTAYFMLVEHDGKKGKRIRTIESVPIMWKERIEKNPAELERYCLEVLKLSNPDIRVRKILIQSLIKRNGYYMQITGKTGNQLYVRNTVSLCLKQEWVNYIKKLEKGNDENITKDKNLVLYDILVDKHNNTIYSQRPNPVGEKLVKRREEFINLNLNDQVTVLLEILKLTQIALGGANLKLIGEAEKTGVMLISKDITTLDEMLLINQSVTGLYEQKVNLLTV

SEQ ID NO: 3090 - protein, 1342 aa, Unknown
  Description of Unknown: uncultivated organism sequence
  Category: MG91 effectors
  Description: MG91-282 effector
MRYFMGLDMGTSSVGWAVTDEHYQLLRRKGKDMWGIREFEEAATAVERRTHRVSRRRRQRQVARIGLLQEYFHDAIHQVDPNFYQRLKNSKYHEEDKDEIVRESNGIFNDAEYTDKEYFKEFPTIFHLRQELIKSKEPHDVRLVYLALLNMFKHRGHFLNATLSADGESRKIKDIYTDFVDKAAEQLGVSFATDIRYEELENYLSSNDLSRKRKGELIAELLHVTRKDKQQYALIECMLGLDKSVKLMFGDTLPEDFDKTIKVNFSDIAFEEKATEISEAIGEEKYDLILIMKEIYDAAILNRIMNGYTYLSDARVAEYEKHKSDLAYLKHYIKEYGTQQQFDFLFRGTEKGSYSAYVHSVNSHEKQRRNMAGNKKEDLYSALKKMLKDMPENEEKTYIMMQIELDNFLPKQLTASNGVIPNQIHLKEMKKILANAENYLPFLKEKDESGYTVSERIQKLFAFQIPYYIGPTTEKSAEFGGNGWVVRKEEGKVLPWNIDQKIDMKKTSEKFISRMVRRCTYMNDEQVLPKESLEYESFCVLNELNNIKVYGEKLPVDIKQDIYRTLCEKGKRITKKSLMQYLVGRGVIKAEDEEQLTGLMDGLNNTLKSFAKFKAIFGDAIYEDSCKKMVEQIIFWCTVYGDSKHFLKEQLLEKYGEVLTDAQIKRILGIKFRDWGNLSKKFLGLQGCSKETGEVNSLIRMLWETNDNLMELLAQDSYTFKEELENMQESTYKVLIELQPEDLDHMYFSAPVKRMIWQTILIIKEVTKVMGCQPERLFIEMTREHGQKNDIKDSRAKKFYELYSKIKDEDKDWRKVIEDADKDGRIRSKKMYLYLTQMGRCMYTGRPIDLDQLFNNNLYDIDHIYPRHYVKDDNLENNMVLVEKQSNAHKSDVYPLESGIYEKQVNWWRELHRKNLINDEKLKRLTGRNPFTDEQKAGFIARQLVETSQGTKGVATILQEALPDTTLVYAKARNVSEFRSDNDLLKSRIVNDFHHAHDAYLNIVIGNVYYVKFTKNPINFIREHGTYNLGKMFAKDVKRGDDIGWVAQSGNGQTATMETIKRTMARNTPLLTRMSYEVTGGLANQTLYSASKAKEGTYIPLKSSDERMQDVTKYGGFTSVSTAYFMLVEHDGKKGKRIRTIESVPIMWKERIEKNPAELERYCLEVLKLSNPDIRVRKILIQSLIKRNGYYMQITGKTGNRVYVRNMVSLCLVQDWVNYIKKLEKDKDENISKEKNIRLYDVLMDKHINTIYNTRPNPVGDLLIKRRSDFIELKITDQVIILLEILKLTQTALGSANLKLIGEAEKTGVMLISKDITALEEMLLINQSVTGLYEQRVNLLTV

SEQ ID NO: 3091 - protein, 1358 aa, Unknown
  Description of Unknown: uncultivated organism sequence
  Category: MG91 effectors
  Description: MG91-283 effector
MEKEYYLGLDMGTNSVGWAVTDDAYNLIRFKGKDMWGIREFDEANPAVERRTHRTSRRRKQRNAVRMGLIRSYFADEIQKVDSNFYQRLDNSFFHVEDKQDNVKDKNGIFNDKNYKDADYYKQYPTIFHLRKELIEDASQKDVRLVYLAVANMFKHRGHFLLSGIGSESSKQTITDLYNQVSGLITEEYGISLKTDIAGTDFEQVLCSREYSRTRKSEKVCEILEIKNSDKLKKAFVKSMCGLSVKITDIIDDTFTEISDEDKKITFSFVDSDYDEKAGVLEEKLGTDVYDIISKLKEIHDKAQVAEIMKNYQYLSFARVADYEKHKKDLKILKRVVKKYFEPTVYDKLFRSEENGTYSAYVNSFNSEEKSRRNYKERKQEDLYNSIKKLLKSVDNVDDTDIEYIKNEMDKENFLPKQLTFKNGVIPNQIHASELKAILKNAEKYLPFLNEKDESGYTVSERILMLFSFQIPYYVGPVSSNSNGWVKRLEPGQVLPWNIDKKIDLKETSEQFIQRMVRNCTYIAGEKVLPKASLLYENFKVLNEINNLSINGERITVNLKQDLYNTLFLKGKRVTRKQIFNYFHSRGLVEEDSQISGIDIAVNNSLSTYGKFLPLFGEHLKEDKYKKMVDDIVFWCTVYGDSRKFLREQLEEKYSDVLDENQIKRITGMKFKDWGNLSKEFLELSGCCKSTGEVMPLIRAMWETNYNLMELLHSEEFTYSEELEEKQGKIEKVLSEYTIDDLNEEYFSAPVKRMVWQTLLIIKEIEKIMKCPPTRIFVEMTRKDDEKGDNGRKSSRKDQLLALYKKIQSEDKEWKKEMSSRIEDYDKNGALRSKKLYLYFIQKGLDMYTGKPIDLDNLMSANSNYDIDHIYPRHFVKDDNINNNLVLASKPANAEKSDIYPIKDSIYQKMKYTWKVLRDEGLITEEKYKRLTGRNPFTDEQKAGFIARQLVETGQGTKGVADLLTALLPDTKLVYSKAGNVSDFRKRYDIPKSRLINDFHHAHDAYLNIVVGNIYFTKFTSNPLNYIRKECSSKDNKYQYNLGNMYKWDVKRDGKTAWVAPEEGETGTLATVKKMLSRNTPILTRLTIEGHGGIADATLYSHKKAKQDTYIPLKSSDARMADVTKYGGYSSVTTAYLFLVEHEIKGKKIRTLETVPIYLKDRLENSKEKLEEYCRETLGYTNPSVRMKKIKLQSLIKLNGYYMQISGRTGNRFTLRNYVQLCLNGKWVDYIHKLEKYQDKGVIDDLITDERNVELYNVLCEKHSVGIFTLRPNLVGDKIKNGYDKFVNLTTEEQIKLLIEIIKLTCVGIVSANLTLIGGAAISGKMLMSKNITYANECILINQSVTGLYENRIDLLGV

SEQ ID NO: 3092 - protein, 1358 aa, Unknown
  Description of Unknown: uncultivated organism sequence
  Category: MG91 effectors
  Description: MG91-284 effector
MEKEYYLGLDMGTNSVGWAVTDDAYNLIRFKGKDMWGIREFDEANPAVERRTHRTSRRREQRNAVRMGLIRSYFADEIQKVDSNFYQRLDNSFFHVEDKQDNVKDKNGIFNDKNYKDADYYKQYPTIFHLRKELIEDDSQKDVRLVYLAVANMFKHRGHFLLSGIGSESSKQTITDLYNQVSGLITEEYGISLKTDIAGTDFEQVLCSREYSRTRKSEKVCEILEIKNSDKLKKAFVKSMCGLSVKITDIIDDTFTEISDEDKKITFSFVDSDYDEKAGVLEEKLGTDVYDIISKLKEIHDKAQVAEIMKNYQYLSFARVADYEKHKKDLKILKRVVKKHFEPTVYDKLFRSEENGTYSAYVNSFNSGEKSRRNYKERKQEDLYNSIKKLLKSVDNVYDTDIEYIKNEMDKENFLPKQLTFKNGVIPNQIHASELKAILKNAEKYLPFLNEKDESGYTVSERILMLFSFQIPYYVGPVSSNSNGWVKRLESGQVLPWNIDKKIDLKETSEQFIQRMVRNCTYIAGEKVLPKASLLYENFKVLNEINNLSINGERITVNLKQDLYNTLFLKGKRVTRKQIFNYFHSRGLVEEDSQISGIDIAVNNSLSTYGKFLPLFGEHLKEDKYKKMVDDIVFWCTVYGDSRKFLREQLEEKYSDVLDENQVKRITGMKFKDWGNLSKEFLELSGCCKSTGEVMPLIRAMWETNYNLMELLHSEEFTYSEELEEKQGKIEKVLSEYTIDDLNEEYFSAPVKRMVWQTLLIIKEIEKIMKCPPTRIFVEMTRKDDEKGDNGRKSSRKDQLLALYKKIQSEDKEWKKEMSSRIEDYDKKGALRSKKLYLYFIQKGLDMYTGKPIDLDNLMSANSNYDIDHIYPRHFVKDDNINNNLVLASKPANAEKSDIYPIKDSIYQKMKYTWKVLRDEGLITEEKYKRLTGRNPFTDEQKAGFIARQLVETGQGTKGVADLLTALLPDTKLVYSKAGNVSDFRKRYDIPKSRLINDFHHAHDAYLNIVVGNIYFTKFTSNPLNYIRKECSSKDNKYQYNLGNMYKWDVKRDGKTAWVAPEEGETGTLATVKKMLSRNTPILTRLTIEGHGGIADATLYSHKKAKQDTYIPLKSSDARMADVTKYGGYSSVTTAYLFLVEHEIKGKKIRTLETVPIYLKDRLENSKEKLEEYCRETLGYTNPSVRMKKIKLQSLIKLNGYYMQISGRTGNRFTLRNYVQLCLNGKWVDYIHKLEKYQDKGVIDDLITDERNVELYNVLCEKHSVGIFTLRPNLVGDKIKNGYDKFVNLTTEEQIKLLIEIIKLTCVGIVSANLTLIGGAAISGKMLMSKNITDANECILINQSVTGLYENRIDLLRV

SEQ ID NO: 3093 - protein, 1352 aa, Unknown
  Description of Unknown: uncultivated organism sequence
  Category: MG91 effectors
  Description: MG91-285 effector
MTAFKYYLGLDMGTNSVGWAATDPEYRLLKAKGKDLWGIREFNEASGAVERRTHRISRRRRQREQVRIGILKDYFHDAICEVDPSFFRRLENSKYHEEDKDVEVRYKNNIFNDGNYTDKDYFNEYPTIYHLRNELISSTEKHDVRLVFLALLNMFKHRGHFLNAGLGENNGESNIDNAYFELTELLSELTEYHLSQDIDCKQIEAILSRRDMSRTHKAEELAGVLHVDLKNKPYKELIRGLCGLKFNACVVFPDVQSEEVTKLDICLSESTFDEKSDEIANIIGEDYFEIIMAMKEMFDIGSLASIMKGHNYLSQARVASYTKHKEDLKLLKEVIKKYCGKKEYDKFFNSDADGSYASYVGSYNSKNKERRVGNKRTSEELYKEIKKLLKDAQKEDENVQKILTSIENETFLPKQLTASNGVIPNQVHAREMKKILSNAENYLPFLTEKDETGLSVSERILKLFTFQIPYYVGPTSENSGKNGGNGWVVRREDGQVLPWNIDEKIDMKATSEAFISRMVRRCTYISGEQVLPKASLEYQSYCVLNEINNIKIDGERISVELKQDIYKAVFQKGKKVTKKQLCKYLYTRGIIETEEQVTGVDVSINSALTTYGKFKPIFGEDISKDSVQKMIEDIVFWCTVYGDSRKFLKARIEEKYGNKLSEEQIKRILGFKFKDWGNLSKKFLELNGADTSTGESISIIRALWNNNLNLMELINSSLYNYKECLAEYQNTMLKTLSEIEAEDLNEYYFSAPVRRMIWQTILVIKELVKVLGCEPERIFVEMTRKPDEHKTRTSSRRNKFEELYKKVKDETTDWMQVIANAEEDGKIRSKKMYLYLTQKGRCMYTGKHIELDDLFDNNLYDIDHIYPRHFVKDDNIDNNLVLVCKEKNAHKSDHYPIEEEIFLSQKKMWLELRKSGFITEEKYNRLMDRNPFSDEQKAGFIARQLVETSQGTKGVANILRQLLPGSKIVYAKASNVSEFRHTRDDIPKSRLVNDFHHAHDAYLNIVVGNVYYVKFTQNPLNFIKKDYDNYKEDYNLSKMFDWDVKRNGEVAWIAQRKDGEAGTITTVKKMLSRNTPLMTRYSFEGKGGLANETLYSAKKAKGEGYIPFKSSDDKMQDVTKYGGFTKVAGAYFFLVEHTEKKKRIRTIESVPVYLTRKIEQKPGELKKYCDEILGLVDADIRLKKIKIGSLIKRNGYFCYITGKTGNQLSVRNAVNLCLKNEWIKYISKLEKVKEKDTIDKIITKEKNEVLYSELIQKFKHCIFSKRPNPVGDKLEKGSEKFSNLSIKEQCAVLCQILQLAAVLGSECDMTLLGESAHCGKMLISKKIGDEEIYLINQSVTGLYEKKINLHTV

SEQ ID NO: 3094 - protein, 1358 aa, Unknown
  Description of Unknown: uncultivated organism sequence
  Category: MG91 effectors
  Description: MG91-286 effector
MEKEYYLGLDMGTNSVGWAVTDDAYNLIRFKGKDMWGIREFDEANPAVERRTHRTSRRREQRNAVRMGLIRSYFADEIQKVDSNFYQRLDNSFFHVEDKQDNVKDKNGIFNDKNYKDADYYKQYPTIFHLRKELIEDASQKDVRLVYLAVANMFKHRGHFLLSGIGSESSKQTITDLYNQVSGLITEEYGISLKTDIAGTDFEQVLCSREYSRTRKSEKVCEILEIKNSDKLKKAFVKSMCGLSVKITDIIDDTFTEISDEDKKITFSFVDSDYDEKAGVLEEKLGTDVYDIISKLKEIHDKAQVAEIMKNYQYLSFARVADYEKHKKDLKILKRVVKKYFEPTVYDKLFRSEENGTYSAYVNSFNSEEKSRRNYKERKQEDLYNSIKKLLKSIDNVDDTDIEYIKNEMDKENFLPKQLTFKNGVIPNQIHASELKAILKNAEKYLPFLNEKDESGYTVSERILMLFSFQIPYYVGPVSSNSNGWVKRLEPGQVLPWNIDKKIDLKETSEQFIQRMVRNCTYIAGEKVLPKASLLYENFKVLNEINNLSINGERITVNLKQDLYNTLFLKGKRVTRKQIFNYFHSRGLVEEDSQISGIDITVNNSLSTYGKFLPLFGEHLKEDKYKKMVDDIVFWCTVYGDSRKFLREQLEEKYSDVLDENQIKRITGMKFKDWGNLSKEFLELSGCCKSTGEVMPLIRAMWETNYNLMELLHSEEFTYSEELEEKQGKIEKVLSEYTIDDLNEEYFSAPVKRMVWQTLLIIKEIEKIMKCPPTRIFVEMTRKDDEKGDNGRKSSRKDQLLALYKKIQSEDKEWKKEMSSRIEDYDKKGALRSKKLYLYFIQKGLDMYTGKPIDLDNLMSANSNYDIDHIYPRHFVKDDNINNNLVLASKPANAEKSDIYPIKDSIYQKMKYTWKVLRDEGLITEEKYKRLTGRNPFTDEQKAGFIARQLVETGQGTKGVADLLTALLPDTKLVYSKAGNVSDFRKKYDIPKSRLINDFHHAHDAYLNIVVGNIYFTKFTSNPLNYIRKECSSKDNKYQYNLGNMYKWDVKRDGKTAWIAAKEGETGTIATVKKMLSRNTPTLTRLTIEGHGGIADATLYSHKKAKQDAYIPLKSSDARMADVTKYGGYSSVTTAYLFLVEHEIKGKKIRTLETVPLYLKDRLENSKEKLEEYCRETLGYTNPSVRMKKIKLQSLIKLNGYYMQISGKTNKQFTVRNYVQFCLNSKWVDYIHKLEKYQDKGVIDDAITDEKNVELYNVLCEKHSVGIFTLRPNPVGDKIKKGYDKFVNLTTEEQIKLLIEIIKLTCVGIVSANLTLIGGASISGKMLISKNITDAKECLLINQSVTGLYENRIDLLRV

SEQ ID NO: 3095 - protein, 1358 aa, Unknown
  Description of Unknown: uncultivated organism sequence
  Category: MG91 effectors
  Description: MG91-287 effector
MEKEYYLGLDMGTNSVGWAVTDDAYNLIRFKGKDMWGIREFDEANPAVERRTHRTSRRREQRNAVRMGLIRSYFADEIQKVDSNFYQRLDNSFFHVEDKQDNVKDKNGIFNDKNYKDADYYKQYPTIFHLRKELIEDASQKDVRLVYLAVANMFKHRGHFLLSGIGSESSKQTITDLYNQVSGLITEEYGISLKTDIAGTDFEQVLCSREYSRTRKSEKVCEILEIKNSDKLKKAFVKSMCGLSVKITDIIDDTFTEISDEDKKITFSFVDSDYDEKAGVLEEKLGTDVYDIISKLKEIHDKAQVAEIMKNYQYLSFARVADYEKHKKDLKILKRVVKKYFEPTVYDKLFRSEENGTYSAYVNSFNSEEKSRRNYKERKQEDLYNSIKKLLKSVDNVDDTDIEYIKNEMDKENFLPKQLTFKNGVIPNQIHASELKAILKNAEKYLPFLNEKDESGYTVSERILMLFSFQIPYYVGPVSSNSNGWVKRLEPGQVLPWNIDKKIDLKETSEQFIQRMVRNCTYIAGEKVLPKASLLYENFKVLNEINNLSINGERITVNLKQDLYNTLFLKGKRVTRKQIFNYFHSRGLVEEDSQISGIDIAVNNSLSTYGKFLPLFGEHLKEDKYKKMVDDIVFWCTVYGDSRKFLREQLEEKYSDVLDENQIKRITGMKFKDWGNLSKEFLELSGCCKSTGEVMPLIRAMWETNYNLMELLHSEEFTYSEELEEKQGKIEKVLSEYTIDDLNEEYFSAPVKRMVWQTLLIIKEIEKIMKCPPTRIFVEMTRKDDEKGDNGRKSSRKDQLLALYKKIQSEDKEWKKEMSSRIEDYDKNGALRSKKLYLYFIQKGLDMYTGKPIDLDNLMSANSNYDIDHIYPRHFVKDDNINNNLVLASKPANAEKSDIYPIKDSIYQKMKYTWKVLRDEGLITEEKYKRLTGRNPFTDEQKAGFIARQLVETGQGTKGVADLLTALLPDTKLVYSKAGNVSDFRKRYDIPKSRLINDFHHAHDAYLNIVVGNIYFTKFTSNPLNYIRKECSSKDNKYQYNLGNMYKWDVKRDGKTAWVAPEEGETGTLATVKKMLSRNTPILTRLTIEGHGGIADATLYSHKKAKQDTYIPLKSSDARMADVTKYGGYSSVTTAYLFLVEHEIKGKKIRTLETVPIYLKDRLENSKEKLEEYCRETLGYTNPSVRMKKIKLQSLIKLNGYYMQISGRTGNRFTLRNYVQLCLNGKWVDYIHKLEKYQDKGVIDDLITDERNVELYNVLCEKHSVGIFTLRPNLVGDKIKNGYDKFVNLTTEEQIKLLIEIIKLTCVGIVSANLTLIGGAAISGKMLMSKNITDANECILINQSVTGLYENRIDLLRV

SEQ ID NO: 3096 - protein, 1358 aa, Unknown
  Description of Unknown: uncultivated organism sequence
  Category: MG91 effectors
  Description: MG91-288 effector
MEKEYYLGLDMGTNSVGWAVTDDAYNLIRFKGKDMWGIREFDEANPAVERRTHRTSRRREQRNAVRMGLIRSYFADEIQKVDSNFYQRLDNSFFYVEDKQDNVKDKNGIFNDKNYKDADYYKQYPTIFHLRKELIEDASQKDVRLVYLAVANMFKHRGHFLLSGIGSESSKQTITDLYNQVSGLITEEYGISLKTDIAGTDFEQVLCSREYSRTRKSEKVCEILEIKNSDKLKKAFVKSMCGLSVKITDIIDDTFTEISDEDKKITFSFVDSDYDEKAGVLEEKLGTDVYDIISKLKEIHDKAQVAEIMKNYQYLSFARVADYEKHKKDLKILKRVVKKYFEPTVYDKLFRSEENGTYSAYVNSFNSEEKSRRNYKERKQEDLYNSIKKLLKSVDNVDDTDIEYIKNEMDKENFLPKQLTFKNGVIPNQIHASELKAILKNAEKYLPFLNEKDESGYTVSERILMLFSFQIPYYVGPVSSNSNGWVKRLEPGQVLPWNIDKKIDLKETSEQFIQRMVRNCTYIAGEKVLPKDSLLYENFKVLNEINNLSINGERITVNLKQDLYNTLFLKGKRVTRKQIFNYFHSRGLVEEDSQISGIDIAVNNSLSTYGKFLPLFGEHLKEDKYKKMVDDIVFWCTVYGDSRKFLREQLEEKYSDVLDENQIKRITGMKFKDWGNLSKEFLELSGCCKSTGEVMPLIRAMWETNYNLMELLHSEEFTYSEELEEKQGKIEKVLSEYTIDDLNEEYFSAPVKRMVWQTLLIIKEIEKIMKCPPTRIFVEMTRKDDEKGDNGRKSSRKDQLLALYKKIQSEDKEWKKEMSSRIEDYDKKGALRSKKLYLYFIQKGLDMYTGKPIDLDNLMSANSNYDIDHIYPRHFVKDDNINNNLVLASKPANAEKSDIYPIKDSIYQKMKYTWKVLRDEGLITEEKYKRLTGRNPFTDEQKAGFIARQLVETGQGTKGVADLLTALLPDTKLVYSKAGNVSDFRKKYDIPKSRLINDFHHAHDAYLNIVVGNIYFTKFTSNPLNYIRKECSSKDNKYQYNLGNMYKWDVKRDGKTAWIAAKEGETGTIATVKKMLSRNTPTLTRLTIEGHGGIADATLYSHKKAKQDAYIPLKSSDARMADVTKYGGYSSVTTAYLFLVEHEIKGKKIRTLETVPLYLKDILENSKEKLEEYCRETLGYTNPSVRMKKIKLQSLIKLNGYYMQISGKTNKQFTVRNYVQFCLNSKWVDYIHKLEKYQDKGVIDDAITDEKNVELYNVLCEKHSVGIFTLRPNPVGDKIKKGYDKFVNLTTEEQIKLLIEIIKLTCVGIVSANLTLIGGASISGKMLISKNITDAKECLLINQSVTGLYENRIDLLRV

SEQ ID NO: 3097 - protein, 1358 aa, Unknown
  Description of Unknown: uncultivated organism sequence
  Category: MG91 effectors
  Description: MG91-289 effector
MEKEYYLGLDMGTNSVGWAVTDDAYNLIRFKGKDMWGIREFDEANPAVERRTHRTSRRRKQRNAVRMGLIRSYFADEIQKVDSNFYQRLDNSFFHVEDKQDNVKDKNGIFNDKNYKDADYYKQYPTIFHLRKELIEDASQKDVRLVYLAVANMFKHRGHFLLSGIGSESSKQTITDLYNQVSGLITEEYGISLKTDIAGTDFEQVLCSREYSRTRKSEKVCEILEIKNSDKLKKAFVKSMCGLSVKITDIIDDTFTEISDEDKKITFSFVDSDYDEKAGVLEEKLGTDVYDIISKLKEIHDKAQVAEIMKNYQYLSFARVADYEKHKKDLKILKRVVKKYFEPTVYDKLFRSEENGTYSAYVNSFNSEEKSRRNYKERKQEDLYNSIKKLLKSVDNVDDTDIEYIKNEMDKENFLPKQLTFKNGVIPNQIHASELKAILKNAEKYLPFLNEKDELGYTVSERILMLFSFQIPYYVGPVSSNSNGWVKRLEPGQVLPWNIDKKIDLKETSEQFIQRMVRNCTYIAGEKVLPKASLLYENFKVLNEINNLSINGERITVNLKQDLYNTLFLKGKRVTRKQIFNYFHSRGLVEEDSQISGIDIAVNNSLSTYGKFLPLFGEHLKEDKYKKMVDDIVFWCTVYGDSRKFLREQLEEKYSDVLDENQIKRITGMKFKDWGNLSKEFLELSGCCKSTGEVMPLIRAMWETNYNLMELLHSEEFTYSEELEEKQGKIEKVLSEYTIDDLNEEYFSAPVKRMVWQTLLIIKEIEKIMKCPPTRIFVEMTRKDDEKGDNGRKSSRKDQLLALYKKIQSEDKEWKKEMSSRIEDYDKNGALRSKKLYLYFIQKGLDMYTGKPIDLDNLMSANSNYDIDHIYPRHFVKDDNINNNLVLASKPANAEKSDIYPIKDSIYQKMKYTWKVLRDEGLITEEKYKRLTGRNPFTDEQKAGFIARQLVETGQGTKGVADLLTALLPDTKLVYSKAGNVSDFRKRYDIPKSRLINDFHHAHDAYLNIVVGNIYFTKFTSNPLNYIRKECSSKDNKYQYNLGNMYKWDVKRDGKTAWVAPEEGETGTLATVKKMLSRNTPILTRLTIEGHGGIADATLYSHKKAKQDTYIPLKSSDARMADVTKYGGYSSVTTAYLFLVEHEIKGKKIRTLETVPIYLKDRLENSKEKLEEYCRETLGYTNPSVRMKKIKLQSLIKLNGYYMQISGRTGNRFTLRNYVQLCLNGKWVDYIHKLEKYQDKGVIDDLITDERNVELYNVLCEKHSVGIFTLRPNLVGDKIKNGYDKFVNLTTEEQIKLLIEIIKLTCVGIVSANLTLIGGAAISGKMLMSKNITYANECILINQSVTGLYENRIDLLRV

SEQ ID NO: 3098 - protein, 1358 aa, Unknown
  Description of Unknown: uncultivated organism sequence
  Category: MG91 effectors
  Description: MG91-290 effector
MEKEYYLGLDMGTNSVGWAVTDDAYNLIRFKGKDMWGIREFDEANPAVERRTHRTSRRREQRNAVRMGLIRSYFADEIQKVDSNFYQRLDNSFFHVEDKQDNVKDKNGIFNDKNYKDADYYKQYPTIFHLRKELIEDASQKDVRLVYLAVANMFKHRGHFLLSGIGSESSKQTITDLYNQVSGLITEEYGISLKTDIAGTDFEQVLCSREYSRTRKSEKVCEILEIKNSDKLKKAFVKSMCGLSVKITDVIDDTFTEISDEDKKITFSFVDSDYDEKAGVLEEKLGTDVYDIISKLKEIHDKAQVAEIMKNYQYLSFARVADYEKHKKDLKILKRVVKKYFEPTVYDKLFRSGENGTYSAYVNSFNSGEKSRRNYKERKQEDLYNSIKKLIKSIDNVCDTDIEYIKNEIEKENFLPKQLTFKNGVIPNQIHASELKAILKNAEKYLPFLNEKDESGYTVSERILMLFSFQIPYYVGPVSPNSNGWVKRLEPGQVLPWNIDKKIDLKETSEQFIQRMVRNCTYIAGEKVLPKASLLYENFKVLNEINNLSINGERIAVALKQDLYNTLFLKGKRVTRKQIFNYFHSRGLVEEDSQISGIDIAVNNSLSTYGKFLPLFGEHLKEDKYKKMVDDIVFWCTVYGDSRKFLREQIEEKYSDVLDENQIKRITGMKFKDWGNLSKEFLELSGCCKSTGEMIPLIRAMWETNYNLMELLHSEEFTYSEELEEKQGKIEKVLSEYTIDDLNEEYFSAPVKRMVWQTLLIIKEIEKIMKCPPTRIFVEMTRKDDEKGDNGRKSSRKDQLLALYKKIQSEDKEWKKEMSSRIEDYDKNGALRSKKLYLYFIQKGLDMYTGKPIDLDNLMSANSNYDIDHIYPRHFVKDDNINNNLVLASKPANAEKSDIYPIKDSIYQKMKYTWKVLRDEGLITEEKYKRLTGRNPFTDEQKAGFIARQLVETGQGTKGVADLLTALLPDTKLVYSKAGNVSDFRKRYDIPKSRLINDFHHAHDAYLNIVVGNIYFTKFTSNPLNYIRKECSSKDNKYQYNLGNMYKWDVKRDGKTAWIAAKEGETGTIATVKKILSRNTPTLTRLTIEGHGGIADATLYSHKKAKQDAYIPLKSSDARMADVTKYGGYSSVTTAYLFLVEHEIKGKKIRTLETVPLYLKDRLENSKEKLEEYCRESLGYTNPSVRMKKIKLQSLIKLNGYYMQISGKSIKQFEVRNYVQICLNGKWVDYIHKLEKYQDKGVIDNAITDEKNVELYNILCEKHSVGIFTLRPNPVGDKIKKGYDKFVNLTTEEQIKLLIEIIKLTCVGIVKADLRLIGASEKSGTMKINKNITDAKECFLINQSVTGLYENRIDLLRV

SEQ ID NO: 3099 - protein, 1352 aa, Unknown
  Description of Unknown: uncultivated organism sequence
  Category: MG91 effectors
  Description: MG91-291 effector
MTAFKYYLGLDMGTNSVGWAATDPEYRLLKAKGKDLWGIREFNEASGAVERRTHRISRRRRQREQVRIGILKDYFHDAICEVDPGFFQRLENSKYHEEDKDVEVRYKNNIFNDSNYTDKDYFNEYPTIYHLRNELISSTEKHDVRLVFLALLNMFKHRGHFLNAGLGENNGESNIDNAYFELTELLSELTEYHLSQDIDCKQIEAILSRRDMSRTHKAEELAGVLHVDLKNKPYKELIRGLCGLKFNACVVFPDVQSEEVTKLDICLSESTFDEKSDEIANIIGEDYFEIIMAMKEMFDIGSLASIMKGHNYLSQARVASYTKHKEDLKLLKEVIKKYCGKKEYDKFFNSDADGSYASYVGSYNSKNKERRVGNKRTSEELYKEIKKLLKDAQKEDENVQKILTSIENETFLPKQLTASNGVIPNQVHAREMKKILSNAENYLPFLTEKDETGLSVSERILKLFTFQIPYYVGPTSENSGKNGGNGWVVRREDGQVLPWNIDEKIDMKATSEAFISRMVRRCTYISGEQVLPKASLEYQSYCVLNEINNIKIDGERISVELKQDIYKAVFQKGKKVTKKQLCKYLHTRGIIETEEQVTGVDVSINNALTTYGKFKPIFGEDISKDSVQKMIEDIVFWCTVYGDSKKFLKDRIEEKYGNKLSEEQIKRILGFKFKDWGNLSKKFLELNGADTSTGESISIIRALWNNNLNLMELINSSLYNYKECLAEYQNTMMKTLSEIEAEDLNEYYFSAPVRRMIWQTILVIKELVKVLGCEPERIFVEMTRKPDEHKTRTSSRRNKFEELYKKVKDETTDWMQVIANAEEDGKIRSKKMYLYLTQKGRCMYTGKHIELDDLFDNNLYDIDHIYPRHFVKDDNIDNNLVLVCKEKNAHKSDHYPIEEEIFLSQKKMWLELRKSGFITEEKYNRLMDRNPFSDEQKAGFIARQLVETSQGTKGVANILRQLLPGSKIVYAKASNVSEFRCTRDDIQKSRLVNDFHHAHDAYLNIVVGNVYYVKFTQNPLNFIKKDYDKYKEDYNLSKMFDWDVKRNGEVAWIAQRKDGAAGTITTVKRMLSRNTPLMTRYSFDGKGGLTNETLYSAKKAKGEGYIPFKSSDDKMQDVTKYGGFTSVTGAYFFLVEHTEKKKRIRTIESVPVYLAQKIEQNPDELKKYCEEILGLIDADIRLKKIKIGSLIKRNGYFCYITGKTVNRLIVRNAVNLCLKNEWIKYISKLEKVKEKDAVDKIITKEKNEVLYSELIQKFKHGIFSKRPNPVGDKLEKDSEKFNNLSIKDQCAVLCQVLRMAAILGSECDMTLLGDSPNCGKMLISKKIGDEEIYLINQSVTGLYEKKINLHTV

SEQ ID NO: 3100 - protein, 1358 aa, Unknown
  Description of Unknown: uncultivated organism sequence
  Category: MG91 effectors
  Description: MG91-292 effector
MEKEYYLGLDMGTNSVGWAVTDDAYNLIRFKGKDMWGIREFDEANPAVERRTHRTSRRRKQRNAVRMGLIRSYFADEIQKVDSNFYQRLDNSFFHVEDKQDNVKDKNGIFNDKNYKDADYYKQYPTIFHLRKELIEDASQKDVRLVYLAVANMFKHRGHFLLSGIGSESSKQTITDLYNQVSGLITEEYGISLKTDIAGTDFEQVLCSREYSRTRKSEKVCEILEIKNSDKLKKAFVKSMCGLSVKITDIIDDTFTEISDEDKKITFSFVDSDYDEKAGVLEEKLGTDVYDIISKLKEIHDKAQVAEIMKNYQYLSFARVADYEKHKKDLKILKRVVKKYFEPTVYDKLFRSEENGTYSAYVNSFNSEEKSRRNYKERKQEDLYNSIKKLLKSVDNVDDTDIEYIKNEMDKENFLPKQLTFKNGVIPNQIHASELKAILKNAEKYLPFLNEKDESGYTVSERILMLFSFQIPYYVGPVSSNSNGWVKRLEPGQVLPWNIDKKIDLKETSEQFIQRMVRNCTYIAGEKVLPKASLLYENFKVLNEINNLSINGERITVNLKQDLYNTLFLKGKRVTRKQIFNYFHSRGLVEEDSQISGIDIAVNNSLSTYGKFLPLFGEHLKEDKYKKMVDDIVFWCTVYGDSRKFLREQLEEKYSDVLDENQIKRITGMKFKDWGNLSKEFLELSGCCKSTGEVMPLIRAMWETNYNLMELLHSEEFTYSEELEEKQGEIEKVLSEYTIDDLNEEYFSAPVKRMVWQTLLIIKEIEKIMKCPPTRIFVEMTRKDDEKGDNGRKSSRKDQLLALYKKIQSEDKEWKKEMSSRIEDYDKNGALRSKKLYLYFIQKGLDMYTGKPIDLDNLMSANSNYDIDHIYPRHFVKDDNINNNLVLASKPANAEKSDIYPIKDSIYQKMKYTWKVLRDEGLITEEKYKRLTGRNPFTDEQKAGFIARQLVETGQGTKGVADLLTALLPDTKLVYSKAGNVSDFRKKYDIPKSRLINDFHHAHDAYLNIVVGNIYFTKFTSNPLNYIRKECSSKDNKYQYNLGNMYKWDVKRDGKTAWIAAKEGETGTIATVKKMLSRNTPTLTRLTIEGHGGIADATLYSHKKAKQDAYIPLKSSDARMADVTKYGGYSSITTAYLFLVEHEIKGKKIRTLETVPLYLKDRLENSKEKLEEYCRETLGYTNPSVRMKKIKLQSLIKLNGYYMQISGKTNKQFTVRNYVQFCLNSKWVDYIHKLEKYQDKGVIDDAITDEKNVELYNVLCEKHSVGIFTLRPNPVGDKIKKGYDKFVNLTTEEQIKLLIEIIKLTCVGIVSANLTLIGGASISGKMLISKNITDAKECLLINQSVTGLYENRIDLLRV

SEQ ID NO: 3101 - protein, 1352 aa, Unknown
  Description of Unknown: uncultivated organism sequence
  Category: MG91 effectors
  Description: MG91-293 effector
MTAFKYYLGLDMGTNSVGWAATDPEYRLLKAKGKDLWGIREFNEASGAVERRTHRISRRRRQREQVRIGILKDYFHDAICEVDPSFFQRLENSKYHEEDKDVEVRYKNNIFNDSNYTDKDYFNEYPTIYHLRNELISSTEKHDVRLVFLALLNMFKHRGHFLNAGLGENNGESNIDNAYFELTELLSELTEYHLSQDIDCKQIEAILSRRDMSRTHKAEELAGVLHVDLKNKPYKELIRGLCGLKFNACVVFPDVQSEEVTKLDICLSESTFDEKSDEIANIIGEDYFEIIMAMKEMFDIGSLASIMKGHNYLSQARVASYTKHKEDLKLLKEVIKKYCGKKEYDKFFNSDADGSYASYVGSYNSKKKERRVGNKRTSEELYKEIKKLLKDAQKEDENVQKILTSIENETFLPKQLTASNGVIQNQVHAREMKKILSNAENYLPFLTKKDETGLSVSERILKLFTFQIPYYIGPTSENSGKNGGNGWVVRREDGQVLPWNIDEKIDMKATSEAFISRMVRRCTYISGEQVLPKASLEYQSYCVLNEINNIKIDGERISVELKQDIYKAVFQKGKKVTKKQLCKYLHTRGIIETEEQVTGVDVSINNALTTYGKFKPIFGEDISKDSVQKMIEDIVFWCTVYGDSKKFLKDRIEEKYGNKLSEEQIKRILGFKFKDWGNLSKKFLELNGADTSTGESISIIRALWNNNLNLMELINSSLYNYKECLAEYQNTMLKTLSEIEAEDLNEYYFSAPVRRMIWQTILVIKELVKVLGCEPERIFVEMTRKPDEHKTRTSSRRNKFEELYKKVKDETTDWMQVIANAEEDGKIRSKKMYLYLTQKGRCMYTGKHIELDDLFDNNLYDIDHIYPRHFVKDDNIDNNLVLVCKEKNAHKSDHYPIEEEIFLSQKKMWLELRKSGFITEEKYNRLMDRNPFSDEQKAGFIARQLVETSQGTKGVANILRQLLPGSKIVYAKASNVSEFRHTRDDIPKSRLVNDFHHAHDAYLNIVVGNVYYVKFTQNPLNFIKKDYDKYKEDYNLSKMFDWDVKRNGEVAWIAQRKDGEAGTITTVKKMLSRNTPLMTRYSFEGKGGLANETLYSAKKAKGEGYIPFKSSDDKMQDVTKYGGFTSVTGAYFFLVEHTEKKKRIRTIESVPVYLAQKIEQNPDELKKYCEEILGLIDADIRLKKIKIGSLIKRNGYFCYITGKTGKQLIVRNAVNLCLKNEWIKYISKLEKVKEIDAVDKIITKEKNEVLYSELIQKFKHGIFSKRPNPVGDKLEKGSEKFSNLSIKEQCAVLCQILQLAAVLGSECDMTLLGESAHCGKMLISKKIGDEEIYLINQSVTGLYEKKINLHTV

SEQ ID NO: 3102 - protein, 1352 aa, Unknown
  Description of Unknown: uncultivated organism sequence
  Category: MG91 effectors
  Description: MG91-294 effector
MTAFKYYLGLDMGTNSVGWAATDPEYRLLKAKGKDLWGIREFNEASGAVERRTHRISRRRRQREQVRIGILKDYFHDAICEVDPGFFRRLENSKYHEEDKDVEVRYKNNIFNDSNYTDKDYFNEYPTIYHLRNELISSTEKHDVRLVFLALLNMFKHRGHFLNAGLGENNGESNIDNAYFELTELLSELTEYHLSHDIDCKQIEAILSRRDMSRTHKVEELAGVLHVDLKNKPYKELIRGLCGLKFNACVVFPDVQSEEVTKLDICLSESSFDEKSDEIANIIGEDYFEIIMAMKEMFDIGSLASIMKGHNYLSQARVASYTKHKEDLKLLKEVIKKYCGKKEYDKFFNSDADGSYASYVGSYNSKNKERRVGNKRTSEELYKEIKKLLKDAPKEDENVQKILTSIENETFLPKQLTASNGVIPNQVHAREMKKILSNAENYLPFLTENDETGLSVSERILKLFTFQIPYYVGPTSENSGKNGGNGWVVRREDGQVLPWNIDEKIDMKATSEAFISRMVRRCTYISGEQVLPKASLEYQSYCVLNEINNIKIDGERISVELKQDIYKAVFQKGKKVTKKQLCKYLHTRGIIETEEQVTGVDVSINNALTTYGKFKPIFGEDISKDSVQKMIEDIVFWCTVYGDSKKFLKDRIEEKYGNKLSEEQIKRILGFKFKDWGNLSKKFLELNGADTSTGESISIIRALWNNNLNLMELINSSLYNYKECLAEYQNTMLKTLSEIEAEDLNEYYFSAPVRRMIWQTILVIKELVKVLGCEPERIFVEMTRRPDEHKTRTSSRRNKFEELYKKVKDEATDWMQVIAKAEEDGKIRSKKMYLYLTQKGRCMYTGKHIELDDLFDKNLYDIDHIYPRHFVKDDNIDNNLVLVCKEKNAHKSDHYPIEEEIFLSQKKMWLELRKSGFITEEKYNRLMGRSPFSDEQKAGFIARQLVETSQGTKGVANILRQLLPGSKIVYAKASNVSEFRHTRDDIPKSRLVNDFHHAHDAYLNIVVGNVYYVKFTQNPLNFIKKDYDKYKEDYNLSKMFDWDVKRNGEVAWIAQRKDGEAGTITTVKRMLSRNTPLMTRYSFEGKGGLANETLCSAKKAKGEGYIPFKSSDDKMQDVTKYGGFTKVTGAYFFLVEHTEKKKRIRTIESVPVYLAQKIEQNPDELKKYCEEILGLVDADIRLKKIKIGSLIKRNGYFCYITGKTGNRLSVRNAVNLCLKNEWIKYISKLEKVKEKDAVDEIITKEKNEVLYSELIQKFKHGIFSKRPNPVEDKLEKGSEKFSNLSIKEQCAVLCQILQLAAVLGSECDMTLLGESAHCGKMLISKKIGDEEIYLLNQSVTGLYEKKINLHTV

SEQ ID NO: 3103 - protein, 1353 aa, Unknown
  Description of Unknown: uncultivated organism sequence
  Category: MG91 effectors
  Description: MG91-295 effector
MAAYYLGLDMGTSSVGWAVTNEQYELIKKKGKDLWGIREFDEAHTAVDRRMMRVSRRRRQRELARIGLLKEYFQDAIAEVDPNFYARLENSKYHLEDKDVSVRTYNGIFADKDYTDKEYFAEYPTIFHLRKELLESQEPHDVRLVYLALVNMFKHRGHFLNATLSSDSENRSIKDVWNEFAEQVYELLGISFSDEIDYMALQEIMCSTDISRKKKAEELVQLLKIDKKEKQKIALLECVIGLNVSIKTIFGACISDDFDPKMKISFSDAGYEEKIVDIQEVLGDENFELIAGMKALYDAAILNQIMGGNAYLSIARVQEYEKHKSDLKILKSIYRKYATKKDYDDMFRSTEKGSYSAYTNSTNSDKVANAENGGEPVRRGIEGRKKEDLYANIKKKLAEMPEDEDVQYVLNEIEKDHFLPKQLTASNGVIPNQIHLKEMKKILSNAENYLPFLKEKDESGYTTTERILKLFSFQIPYYVGPVTEKSARDGGNGWVIRKEDGVVLPWNINEKIDMKKTSEAFISRMVRRCTYMSGEQVLPKASLEYESFCVLNELNNLKVRGEKLPVEIKQNMYKDLFETGKRVTKNKIIKYLIGQGVLSEGNEDELTGLMDGINGTLSSFAKFRAVFGDAIYEDSCKKMVEQIIFWCTVYGDSKSFLKEQLEEKYAKDLTPEQMKRILGFKFKDWGNLSKEFLELNGCKKDTGEAASLIRMLWETNDNLMELLAKDKYTYQEKLQESQEKSYKILSEMQPEDLEDYYFSAPVKRMVWQTLLVIKEIEKVMGEPPKRLFVEMTRSENKKEGMKNSRAKKFLDLYKKIKDEDKDWKKIIESADEDGRIRSKKMYLYLTQKGRCMYTGRPIDLDQLFNNNLYDIDHIYPRHFVKDDNLENNLVLVEKEKNARKSDTYPLDEEIYKKQLNWWRELHQQNLINDEKFKRLTGRNPFSDEQKAGFIARQLVETSQGTKGVATILKEVFPEETTIVYAKARNVSDFRHDYDLLKSRIVNDFHHAQDAYLNIVVGNVYYVKFTQNPMNFIRENKSYNLGKMFAWDVKRGNETAWIAKPENGSAATIATVRKVMAKNTPLLTRLSFEGGGGIANQTLYSAKKAKEEGYIPLKSSDPKMQDIKKYGGYTSVTTAYFILVEHGTEKKRIRTIESVTLIWKDRIEKNPDELQVYCEEVLGLINPDIRVRKILIQSLIKREGYYMHISGKTGNQIKLRNAVSLCLKTTWTNYIKKLEKGEKTEEITKASNIALYEELMRKHKETIYAKRPNPVGDKLLSGEEKFEKMEVEIQIKVLLEILKLTQIGLPTADLREIGESANTGVMLMSKNITKLQEIKLIHQSVTGIYEQQVDLLTV

SEQ ID NO: 3104 - protein, 1352 aa, Unknown
  Description of Unknown: uncultivated organism sequence
  Category: MG91 effectors
  Description: MG91-296 effector
MTAFKYYLGLDMGTNSVGWAATDPEYRLLKAKGKDLWGIREFNEASGAVERRTHRISRRRRQREQVRIGILKDYFHDAICEVDPGFFQRLENSKYHEEDKDVEVRYKNNIFNDSNYTDKDYFNEYPTIYHLRNELISSTEKHDVRLVFLALLNMFKHRGHFLNAGLGENNGESNIDNAYFELTELLSELTEYHLSQDIDCKQIEAILSRRDMSRTHKAEELAGVLHVDLKNKPYKELIRGLCGLKFNACVVFPDVQSEEVTKLDICLSESTFDEKSDEIANIIGEDYFEIIMAMKEMFDIGSLASIMKGHNYLSQARVASYTKHKEDLKLLKEVIKKYCGKKEYDKFFNSDADGSYASYVGSYNSKNKERRVGNKRTSEELYKEIKKLLKDAQKEDENVQKILTSIENETFLPKQLTASNGVIPNQVHAREMKKILSNAENYLPFLTEKDETGLSVSERILKLFTFQIPYYVGPTSENSGKNGGNGWVVRREDGQVLPWNIDEKIDMKATSEAFISRMVRRCTYISGEQVLPKASLEYQSYCVLNEINNIKIDGERISVELKQDIYKAVFQKGKKVTKKQFCKYLHTRGIIETEEQVTGVDVSINNALTTYGKFKPIFGEDISKDSVQKMIEDIVFWCTVYGDSKKFLKDRIEEKYGNKLSEEQIKRILGFKFKDWGNLSKKFLELNGADTSTGESISIIRALWNNNLNLMELINSSLYNYKECLAEYQNTMLKTLSEIEAEDLNEYYFSAPVRRMIWQTILVIKELVKVLGCEPERIFVEMTRKPDEHKTRTSSRRNKFEELYKKVKDETTDWMQVIANAEEDGKIRSKKMYLYLTQKGRCMYTGKHIELDDLFDNNLYDIDHIYPRHFVKDDNIDNNLVLVCKEKNAHKSDHYPIEEEIFLSQKKMWLELRKSGFITEEKYNRLMDRNPFSDEQKAGFIARQLVETSQGTKGVANILRQLLPGSKIVYAKASNVSEFRCTRDDIQKSRLVNDFHHAHDAYLNIVVGNVYYVKFTQNPLNFIKKDYDKYKEDYNLSKMFDWDVKRNGEVAWIAQRKDGAAGTITTVKRMLSRNTPLMTRYSFDGKGGLTNETLYSAKKAKGEGYIPFKSSDDKMQDVTKYGGFTSVTGAYFFLVEHTEKKKRIRTIESVPVYLAQKIEQNPDELKKYCEEILGLIDADIRLKKIKIGSLIKRNGYFCYITGKTVNRLIVRNAVNLCLKNEWIKYISKLEKVKEKDAVDKIITKEKNEVLYSELIQKFKHGIFSKRPNPVGDKLEKDSEKFNNLSIKDQCAVLCQVLRMAAILGSECDMTLLGDSPNCGKMLISKKIGDEEIYLINQSVTGLYEKKINLHTV

SEQ ID NO: 3105 - protein, 1274 aa, Unknown
  Description of Unknown: uncultivated organism sequence
  Category: MG91 effectors
  Description: MG91-297 effector
MEKEYYLGLDMGTNSVGWAVTDDAYNLIRFKGKDMWGIREFDEANPAVERRTHRTSRRREQRNAVRMGLIRSYFADEIQKVDSNFYQRLDNSFFHVEDKQDNVKDKNGIFNDKNYKDADYYKQYPTIFHLRKELIEDASQKDVRLVYLAVANMFKHRGHFLLSGIGSESSKQTITDLYNQVSGLITEEYGISLKTDIAGTDFEQVLCSREYSRTRKSEKVCEILEIKNSDKLKKAFVKSMCGLSVKITDIIDDTFTEISDEDKKITFSFVDSDYDEKAGVLEEKLGTDVYDIISKLKEIHDKAQVAEIMKNYQYLSFARVADYEKHKKDLKILKRVVKKYFEPTVYDKLFRSEENGTYSAYVNSFNSEEKSRRNYKERKQEDLYNSIKKLLKSVDNVDDTDIEYIKNEMDKENFLPKQLTFKNGVIPNQIHASELKAILKNAEKYLPFLNEKDESGYTVSERILMLFSFQIPYYVGPVSSNSNGWVKRLEPGQVLPWNIDKKIDLKETSEQFIQRMVRNCTYIAGEKVLPKASLLYENFKVLNEINNLSINGERITVNLKQDLYNTLFLKGKRVTRKQIFNYFHSRGLVEEDSQISGIDIAVNNSLSTYGKFLPLFGEHLKEDKYKKMVDDIVFWCTVYGDSRKFLREQLEEKYSDVLDENQIKRITGMKFKDWGNLSKEFLELSGCCKSTGEVMPLIRAMWETNYNLMELLHSEEFTYSEELEEKQGKIEKVLSEYTIDDLNEEYFSAPVKRMVWQTLLIIKEIEKIMKCPPTRIFVEMTRKDDEKGDNGRKSSRKDQLLALYKKIQSEDKEWKKEMSSRIEDYDKNGALRSKKLYLYFIQKGLDMYTGKPIDLDNLMSANSNYDIDHIYPRHFVKDDNINNNLVLASKPANAEKSDIYPIKDSIYQKMKYTWKVLRDEGLITEEKYKRLTGRNPFTDEQKAGFIARQLVETGQGTKGVADLLTALLPDTKLVYSKAGNVSDFRKRYDIPKSRLINDFHHAHDAYLNIVVGNIYFTKFTSNPLNYIRKECSSKDNKYQYNLGNMYKWDVKRDGKTAWVAPEEGETGTLATVKKMLSRNTPILTRLTIEGHGGIADATLYSHKKAKQDTYIPLKSSDARMADVTKYGGYSSVTTAYLFLVEHEIKGKKIRTLETVPLYLKDRLENSKEKLEEYCRETLGYTNPSVRMKKIKLQSLIKLNGYYMQISGKTNKQFTVRNYVQFCLNSKWVDYIHKLEKYQDKGVIDDAITDEKMWNCIMFYAKNIVWAYLHYVRIR

SEQ ID NO: 3106 - protein, 1352 aa, Unknown
  Description of Unknown: uncultivated organism sequence
  Category: MG91 effectors
  Description: MG91-298 effector
MTAFKYYLGLDMGTNSVGWAATDPEYRLLKAKGKDLWGIREFNEASGAVERRTHRISRRRRQREQVRIGILKDYFHDAICEVDPGFFQRLENSKYHEEDKDVEVRYKNNIFNDSNYTDKDYFNEYPTIYHLRNELISSTEKHDVRLVFLALLNMFKHRGHFLNAGLGENNGESNIDNAYFELTELLSELTEYHLSQDIDCKQIEAILSRRDMSRTHKAEELAGVLHVDLKNKPYKELIRGLCGLKFNACVVFPDVQSEEVTKLDICLSESTFDEKSDEIANIIGEDYFEIIMAMKEMFDIGSLASIMKGHNYLSQARVASYTKHKEDLKLLKEVIKKYCGKKEYDKFFNSDADGSYASYVGSYNSKNKERRVGNKRTSEELYKEIKKLLKDAQKEDENVQKILTSIENETFLPKQLTASNGVIPNQVHAREMKKILSNAENYLPFLTEKDETGLSVSERILKLFTFQIPYYVGPTSENSGKNGGNGWVVRREDGQVLPWNIDEKIDMKATSEAFISRMVRRCTYISGEQVLPKASLEYQSYCVLNEINNIKIDGERISVELKQDIYKAVFQKGKKVTKKQLCKYLHTRGIIETEEQVTGVDVSINNALTTYGKFKPIFGEDISKDSVQKMIEDIVFWCTVYGDSKKFLKDRIEEKYGNKLSEEQIKRILGFKFKDWGNLSKKFLELNGADTSTGESISIIRALWNNNLNLMELINSSLYNYKECLAEYQNTMLKTLSEIEAEDLNEYYFSAPVRRMIWQTILVIKELVKVLGCEPERIFVEMTRKPDEHKTRTSSRRNKFEELYKKVKDETTDWMQVIANAEEDGKIRSKKMYLYLTQKGRCMYTGKHIELDDLFDNNLYDIDHIYPRHFVKDDNIDNNLVLVCKEKNAHKSDHYPIEEEIFLSQKKMWLELRKSGFITEEKYNRLMDRNPFSDEQKAGFIARQLVETSQGTKGVANILRQLLPGSKIVYAKASNVSEFRCTRDDIQKSRLVNDFHHAHDAYLNIVVGNVYYVKFTQNPLNFIKKDYDKYKEDYNLSKMFDWDVKRNGEVAWIAQRKDGAAGTITTVKRMLSRNTPLMTRYSFDGKGGLTNETLYSAKKAKGEGYIPFKSSDDKMQDVTKYGGFTSVTGAYFFLVEHTEKKKRIRTIESVPVYLAQKIEQNPDELKKYCEEILGLIDADIRLKKIKIGSLIKRNGYFCYITGKTVNRLIVRNAVNLCLKNEWIKYISKLEKIKEKDAVDKIITKEKNEVLYSELIQKFKHGIFSKRPNPVGDKLEKDSEKFNNLSIKDQCAVLCQVLRMAAILGSECDMTLLGDSPNCGKMLISKKIGDEEIYLINQSVTGLYEKKINLHTV

SEQ ID NO: 3107 - protein, 1352 aa, Unknown
  Description of Unknown: uncultivated organism sequence
  Category: MG91 effectors
  Description: MG91-299 effector
MTAFKYYLGLDMGTNSVGWAATDPEYRLLKAKGKDLWGIREFNEASGAVERRTHRISRRRRQREQVRIGILKDYFHDAICEVDPGFFQRLENSKYHEEDKDVEVRYKNNIFNDSNYTDKDYFNEYPTIYHLRNELISSTEKHDVRLVFLALLNMFKHRGHFLNAGLGENNGESNIDNAYFELTELLSELTEYHLSQDIDCKQIEAFLSRRDMSRTHKAEELAGVLHVDLKNKPYKELIRGLCGLKFNACVVFPDVQSEEVTKLDICLSESTFDEKSDEIANIIGEDYFEIIMAMKEMFDIGSLASIMKGHNYLSQARVASYTKHKEDLKLLKEVIKKYCGKKEYDKFFNSDADGSYASYVGSYNSKNKERRVGNKRTSEELYKEIKKLLKDAQKEDENVQKILTSIENETFLPKQLTASNGVIPNQVHAREMKKILSNAENYLPFLTEKDETGLSVSERILKLFTFQIPYYVGPTSENSGKNGGNGWVVRREDGQVLPWNIDEKIDMKATSEAFISRMVRRCTYISGEQVLPKASLEYQSYCVLNEINNIKIDGERISVELKQDIYKAVFQKGKKVTKKQLCKYLHTRGIIETEEQVTGVDVSINNALTTYGKFKPIFGEDISKDSVQKMIEDIVFWCTVYGDSKKFLKDRIEEKYGNKLSEEQIKRILGFKFKDWGNLSKKFLELNGADTSTGESISIIRALWNNNLNLMELINSSLYNYKECLAEYQNTMLKTLSEIEAEDLNEYYFSAPVRRMIWQTILVIKELVKVLGCEPERIFVEMTRKPDEHKTRTSSRRNKFEELYKKVKDETTDWMQVIANAEEDGKIRSKKMYLYLTQKGRCMYTGKHIELDDLFDNNLYDIDHIYPRHFVKDDNIDNNLVLVCKEKNAHKSDHYPIEEEIFLSQKKMWLELRKSGFITEEKYNRLMDRNPFSDEQKAGFIARQLVETSQGTKGVANILRQLLPGSKIVYAKASNVSEFRCTRDDIQKSRLVNDFHHAHDAYLNIVVGNVYYVKFTQNPLNFIKKDYDKYKEDYNLSKMFDWDVKRNGEVAWIAQRKDGAAGTITTVKRMLSRNTPLMTRYSFDGKGGLTNETLYSAKKAKGEGYIPFKSSDDKMQDVTKYGGFTSVTGAYFFLVEHTEKKKRIRTIESVPVYLAQKIEQNPDELKKYCEEILGLIDADIRLKKIKIGSLIKRNGYFCYITGKTVNRLIVRNAVNLCLKNEWIKYISKLEKVKEKDAVDKIITKEKNEVLYSELIQKFKHGIFSKRPNPVGDKLEKDSEKFNNLSIKDQCAVLCQVLRMAAILGSECDMTLLGDSPNCGKMLISKKIGDEEIYLINQSVTGLYEKKINLHTV

SEQ ID NO: 3108 - protein, 1352 aa, Unknown
  Description of Unknown: uncultivated organism sequence
  Category: MG91 effectors
  Description: MG91-300 effector
MTAFKYYLGLDMGTNSVGWAATDPGYRLLKAKGKDLWGIREFNEASGAVERRTHRISRRRRQREQVRIGILKDYFHDAICEVDPSFFQRLENSKYHEEDKDVEVRYKNNIFNDSNYTDKDYFNEYPTIYHLRNELISSTEKHDVRLVFLALLNMFKHRGHFLNAGLGENNGESNIDNAYFELTELLSELTEYHLSQDIDCKQIEAILSRRDMSRTHKAEELAGVLHVDLKNKPYKELIRGLCGLKFNACVVFPDVQSEEVTKLDICLSESTFDEKSDEIANIIGEDYFEIIMAMKEMFDIGSLASIMKGHNYLSQARVASYTKHKEDLKLLKEVIKKYCGKKEYDKFFNSDADGSYASYVGSYNSKNKERRVGNKRTSEELYKEIKKLLKDAQKEDENVQKILTSIENETFLPKQLTASNGVIPNQVHAREMKKILSNAENYLPFLTEKDETGLSVSERILKLFTFQIPYYVGPTSENSGKNGGNGWVVRREDGQVLPWNIDEKIDMKATSEAFISRMVRRCTYISGEQVLPKASLEYQSYCVLNEINNIKIDGERISVELKQDIYKAVFQKGKKVTKKQLCKYLHTRGIIETEEQVTGVDVSINNALTTYGKFKPIFGEDISKDSVQKMIEDIVFWCTVYGDSKKFLKDRIEEKYGNKLSEEQIKRILGFKFKDWGNLSKKFLELNGADTSTGESISIIRALWNNNLNLMELINSSLYNYKECLAEYQNTMLKTLSEIEAEDLNEYYFSAPVRRMIWQTILVIKELVKVLGCEPERIFVEMTRKPDEHKTRTSSRRNKFEELYKKVKDETTDWMQVIANAEEDGKIRSKKMYLYLTQKGRCMYTGKHIELDDLFDNNLYDIDHIYPRHFVKDDNIDNNLVLVCKEKNAHKSDHYPIEEEIFLSQKKMWLELRKSGFITEEKYNRLMDRNPFSDEQKAGFIARQLVETSQGTKGVANILRQLLPGSKIVYAKASNVSEFRCTRDDIQKSRLVNDFHHAHDAYLNIVVGNVYYVKFTQNPLNFIKKDYDKYKEDYNLSKMFDWDVKRNGEVAWIAQRKDGAAGTITTVKRMLSRNTPLMTRYSFDGKGGLTNETLYSAKKAKGEGYIPFKSSDDKMQDVTKYGGFTSVTGAYFFLVEHTEKKKRIRTIESVPVYLAQKIEQNPDELKKYCEEILELIDADIRLKKIKIGSLIKRNGYFCYITGKTGNRLIVRNAVNLCLKNEWIKYISKLEKVKEKDAVDKIITKEKNEVLYSELIQKFKHGIFSKRPNPVGDKLEKDSEKFNNLSIKDQCAVLCQVLRMAAILGSECDMTLLGDSPNCGKMLISKKIGDEEIYLINQSVTGLYEKKINLHTV

SEQ ID NO: 3109 - protein, 1342 aa, Unknown
  Description of Unknown: uncultivated organism sequence
  Category: MG91 effectors
  Description: MG91-301 effector
MRYFMGLDMGTSSVGWAVTDEHYQLLRRKGKDMWGIREFEEAATAVERRTHRVSRRRRQRQVARIGLLQEYFHDAIHQVDPNFYQRLKNSKYHEEDKDEIVRGSNGIFNDAEYTDKEYFKEFPTIFHLRQELIKSKEPHDVRLVYLALLNMFKHRGHFLNATLSADGESRKIKDIYTDFVDKAAEQLGISFATDIKYEELENYLSSNDLSRKRKGELIAELLHVTRKDKQQYALIECMLGLDKSVKLMFGDTLPEDFDKTIKVNFSDIAFEEKATEISEAIGEEKYDLILIMKEIYDAAILNRIMNGYTYLSDARVAEYEKHKSDLACLKHYIKEYGTQHQFDFLFRGTEKGSYSAYVHSVNSHEKQRRNMDGNKKEDLYSTLKKILKDMPENEEKTHIMMQIELDNFLPKQLTASNGVIPNQIHLKEMKKILANAENYLPFLKEKDESGYTVSERIQKLFAFQIPYYIGPTTEKSAEFGGNGWVVRKEEGKVLPWNIDQKIDMKKTSEEFISRMVRRCTYMNDEQVLPKESLEYESFCVLNELNNIKVYGEKLPVDIKQDIYRTLCEKGKRITKKSLMKYLVGRGVIKAEDEEQLTGLMDGLNNTLKSFAKFKAIFGDAIYEDSCKKMVEQIIFWCTVYGDSKHFLKEQLLEKYGEVLTDAQIKRILGIKFRDWGNLSKKFLELQGCCKETGEVNSLIRMLWETNDNLMELLARDSYTFKEELENMQESTYKVLAELQPEDLDHMYFSAPVKRMIWQTILIIKEVTKVIGCQPERLFIEMTREHGQKNDIKDSRAKKFYELYSKIKDEDKDWRKVIEDADKDGRIRSKKMYLYLTQMGRCMYTGRPIELDQLFNNNLYDIDHIYPRHYVKDDNLENNMVLVEKQSNAHKSDVYPLESGIYEKQVNWWRELHRKNLINDEKLKRLTGRNPFTDEQKAGFIARQLVETSQGTKGVATILQEALPDTTLVYAKAKNVSDFRNDYDLLKSRIVNDFHHAHDAYLNIVIGNVYYVKFTKNPINFIREHGTYNLGKMYAKDVKRGDEIAWVAQSGNGQTATMETIRRTMARNTPLLTRMSYEVTGGLANQTLYSASKAKEGTYISLKSSDERMQDVTKYGGFTSVSTAYFMLVEHDGKKGKRIRTIESVPIMWKERIEKNPVELERYCLEVLKLSNPDIRVRKILIQSLIKRNGYFMYITGKTNKQLSVRNKVSLCLTQNWVNYIKNLENDNDDNITKKENLELYDILSDKHNNTIYRQRPNPVGSKLHKCRDRFINLEMNEQKVVLLEILKLTQIASTSANLELLGESKQTGVMFIGKDITALDEILLINQSVTGLYEQRVNLLTV

SEQ ID NO: 3110 - protein, 1353 aa, Unknown
  Description of Unknown: uncultivated organism sequence
  Category: MG91 effectors
  Description: MG91-302 effector
MAAYYLGLDMGTSSVGWAVTNEQYELIKKKGKDLWGIREFDEAHTAVDRRMMRVSRRRRQRELARIGFLKEYFQDAIAEVDPNFYARLENSKYHLEDKDVSVRTYNGIFADKDYTDKEYFAEYPTIFHLRKELLESQEPHDVRLVYLALVNMFKHRGHFLNATLSSDSENRSIKDVWNEFAEQVYELLGISFSDEIDYMALQEIMCSTDISRKKKAEELVQLLKIDKKEKQKIALLECVIGLNVSIKTIFGACISDDFDPKMKISFSDAGYEEKIVDIQEVLGDENFELIAGMKALYDAAILNQIMGGNAYLSIARVQEYEKHKSDLKILKSIYRKYATKKDYDDMFRSTEKGSYSAYTNSTNSDKVANAENGGEPVRRGIEGRKKEDLYANIKKKLAEMPEDEDVQYVLNEIEKDHFLPKQLTASNGVIPNQIHLKEMKKILSNAENYLPFLKEKDESGYTTTERILKLFSFQIPYYVGPVTEKSARDGGNGWVVRKEDGVVLPWNINEKIDMKKTSEAFISRMVRRCTYMSGEQVLPKASLEYESFCVLNELNNLKVRGEKLPIEIKQNMYKDLFETGKRVTKNKIVKYLIGQGVLCEGNEDELTGLMDGINGTLSSFAKFRAVFGDAIYEDSCKKMVEQIIFWCTVYGDSKSFLKEQLEEKYAKDLTPEQMKRILGFKFKDWGNLSKEFLELNGCKKDTGEAASLIRMMWETNDNLMELLAKDKYTYQEKLQESQEKSYKILSEMQLEDLEDYYFSAPVKRMVWQTLLVIKEIEKVMGEPPKRLFVEMTRSEDKKKEMKDSRAKKFLELYKKIKDEDKDWKKIIESADEDGRIRSKKMYLYLTQKGRCMYTGRPIDLDQLFNNNLYDIDHIYPRHFVKDDNLENNLVLVEKEKNARKSDTYPLDEEIYKKQLNWWRELHQQNLINDEKFKRLTGRNPFSDEQKAGFIARQLVETSQGTKGVATILKEVFSEETTIVYAKARNVSDFRHDYDLLKSRIVNDFHHAQDAYLNIVVGNVYYVKFTQNPMNFIRENKSYNLGKMFAWDVKRGNETAWIAKPENGSAATIATVRKVMAKNTPLLTRLSFEGSGGIANQTLYSAKKAKEEGYIPLKSSDPKMQDIKKYGGYTSVTTAYFILVEHGTEKKRIRTIESVTLIWKDRIEKNPDELQVYCEEVLGLINPDIRVRKILIQSLIKREGYYMHISGKTGNQIKLRNAVSLCLKTTWTNYIKKLEKGEKTEEITKASNIALYEELMRKHKETIYAKRPNPVGDKLLSGEEKFEKMEVEIQIKVLLEILKLTQIGLPTADLREIGESANTGVMLMSKNITKLQEIKLIHQSVTGIYEQQVDLLTV

SEQ ID NO: 3111 - protein, 1352 aa, Unknown
  Description of Unknown: uncultivated organism sequence
  Category: MG91 effectors
  Description: MG91-303 effector
MQEKPYYLGLDMGTNSVGWAVTDQHYNLLKAKGKDLLGIREFIEADTSVERRTHRISRRRRQREQARIGLLNDYFHDAIIAIDPSFFQRLENSKYHLEDKDQNVRYKYNIFNDPDYTDADYYTQYPTIYHLRKELLENPKPHDVRLVYLALLNMFKHRGHFLNSGISDGNNERSLKDAYINFAISVSELTEDYFNQDVDYSTIEGILSSRDLNRTKKAEELSTVLGIDFKNKKYKEYLRAICGLKINAYTLFSDQLPDDTTKIDLCVSDASFDEKSEELVSLIGEDLFQIILNIKEIYDIGSLAGILKGYTYLSQARVAAYDKHKHDLKLLKSSIKKYCTKEEYNNFFNSDADGSYASYIGSFNSGNKERRVGSKRTSEDLYKEIKKLLKGANKSDPAINEIFTSIETESFLPKQLTASNGIIPNQVHSKEMARILTNAENYLPFLKETDENNLSISNRILQLYKFQIPYYIGPVTEKSQRDGGNGWVIRKDNGRVFPWNIEEKIDVKATSEAFISRMVRRCTYMNGKQVLPKASLEYESFRVLNEINNLRIDGERIPVTLKQDIYTDLFQKGKKVTKKQLCNYLATRGLIESSEQVTGIDIAINNSLSTYGKFKAIFGEDIKLDHIQHMIEDIVFWCTVYGDSKQFLKEQIDDKYKGKLSPEQMKRILGFKFKDWGNLSKEFFELKGADKSTGEAVSIIRALWENNLNLMELINSSEFDFKEQLADYEANSLKTLSDFEPEDLNDYYFSAPVRRMIWQTTLIIKELVHVLGKEPARIFIEMTREKDASRGRTLSRKKKFEDLYKNVKDENTDWAKVIEHADESGTIRSKKMYLYLTQKGRCMYTGNHIELSDLFNDNLYDIDHIYPRHFVKDDNIDNNLVLVTKEKNAHKSDNYPLEAEIFNKQRNMWTQLRKEGFISEEKYNRLMGRNAFTDEQKAGFIARQLVETSQGTKGVAELFHQLLPNSKIVYAKAGNVSDFRRNRELPKSRLVNDFHHAHDAYLNIVVGNVYYVKFTQNPINYIKNSYNKDMNKNNYNLSRMFDWDVKRGDEVAWIAQKQDGAAGTISTVKKMLSKNTPLMTRLSYEGKGALANETLYSAEKAKGEGYIPFKSSDTKIQDVTKYGGFTSVTGAYFFLVEHDEKKKRIRTIESVPLYLADKIDKDSSELERYCDKLGLVNYDVRVRKIKIGSLIKYNGYFCYITGKTGYRLIVRNATNLCLTSNWRKYIKKIEKYKETTIIDNVITAEENIKLYNELLNKFTVGIFGRRPNPIGEKMDSARDKFASLSIENQCLALYQILQLTAILGNESDLQLIGASTHAGKMLISKKIGTDEIYLINQSPTGLFETKIDLQTI

SEQ ID NO: 3112 - protein, 1342 aa, Unknown
  Description of Unknown: uncultivated organism sequence
  Category: MG91 effectors
  Description: MG91-304 effector
MRYFMGLDMGTSSVGWAVTDEHYQLLRRKGKDMWGIREFEEAATAVERRTHRVSRRRRQRQVARIGLLQEYFHDAIHQVDPNFYQRLKNSKYHEEDKDEIVRESNGIFNDAEYTDKEYFKEFPTIFHLRQELIKSKEPHDVRLVYLALLNMFKHRGHFLNATLSADGESRKIKDIYTDFVDKAAEQLGVSFATDIRYEELENYLSSNDLSRKRKGELIAELLHVTRKDKQQYALIECMLGLDKSVKLMFGDTLPENFDKTIKVNFSDIAFEEKATEISEAIGEEKYDLILIMKEIYDAAILNRIMNGYTYLSDARVAEYEKHKSDLAYLKHYIKEYGTQQQFDFLFRGTEKGSYSAYVHSVNSHEKQRRNMAGNKKEDLYSALKKMLKDMPENEEKTYIMMQIELDNFLPKQLTASNGVIPNQIHLKEMKKILANAENYLSFLKEKDESGYTVSERIQKLFAFQIPYYIGPTTEKSAEFGGNGWVVRKEEGKVLPWNIDQKIDMKKTSEKFISRMVRRCTYVNDEQVLPKESLEYESFCVLNELNNIKVYGEKLPVDIKQDIYRTLCEKGKRITKKSLMKYLVGRGVIKAEDEEQLTGLMDGLNNTLKSFAKFKTIFGDAIYEDSCKKMVEQIIFWCTVYGDSKHFLKEQLLEKYGEVLTDAQIKRILGIKFRDWGNLSKKFLELQGCCKETGEVNSLIRMLWETNDNLMELLARDSYTFKEELEKMQESTYKVLTELQPEDLDHMYFSAPVKRMIWQTILIIKEVTKVIGCQPERLFIEMTREHGQKNDIKDSRAKKFYELYSKIKDEDKDWRKVIEDADKDGRIRSKKMYLYLTQMGRCMYTGRPIELDQLFNNNLYDIDHIYPRHYVKDDNLENNMVLVEKQSNAHKSDVYPLESGIYEKQVNWWRELHRKNLINDEKLKRLTGRNPFTDEQKAGFIARQLVETSQGTKGVATILQEALPDTTLVYAKAKNVSDFRNDYDLLKSRIVNDFHHAHDAYLNIVIGNVYYVKFTKNPINFIREHGTYNLGKMYAKDVKRGDEIAWVAQSGNGQTATMETIRRTMARNTPLLTRMSYEVTGGLANQTLYSANTAKEGIYIPLKSSDEKMHDITKYGGFTSVKGAYFILVEHDDKKGKRIRTIESVPIMWKGRIEKNPAELERYCVEVLKLHNPEIKIRKILYKSLIRENGYYMYISSNEEGRLCMMNAVSLCLKQDWINYIHKLEKLNFENISREKNIKLYQILCDKHKNTIYINRPNSLGKLFDECKENFFDLTLNDQVTVLLEMLKTTQISLATANFSILNKGKNIGKMRMNKKISNEKDILLINQSVTGLYEQKVNLLTV

SEQ ID NO: 3113 - protein, 1245 aa, Unknown
  Description of Unknown: uncultivated organism sequence
  Category: MG91 effectors
  Description: MG91-305 effector
MTAFKYYLGLDMGTNSVGWAATDPEYRLLKAKGKDLWGIREFNEASGAVERRTHRISRRRRQREQVRIGILKDYFHDAICEVDPSFFRRLENSKYHEEDKDVEVRYKNNIFNDGNYTDKDYFNEYPTIYHLRNELISSTEKHDVRLVFLALLNMFKHRGHFLNAGLGENNGESNIDNAYFELTELLSELTEYHLSQDIDCKQIEAILSRRDMSRTHKAEELAGVLHVDLKNKPYKELIRGLCGLKFNACVVFPDVQSEEVTKLDICLSESTFDEKSDEIANIIGEDYFEIIMAMKEMFDIGSLASIMKGHNYLSQARVASYTKHKEDLKLLKEVIKKYCGKKEYDKFFNSDADGSYASYVGSYNSKNKERRVGNKRTSEELYKEIKKLLKDAQKEDENVQKILTSIENETFLPKQLTASNGVIPNQVHAREMKKILSNAENYLPFLTEKDETGLSVSERILKLFTFQIPYYVGPTSENSGKNGGNGWVVRREDGQVLPWNIDEKIDMKATSEAFISRMVRRCTYISGEQVLPKASLEYQSYCVLNEINNIKIDGERISVELKQDIYKAVFQKGKKVTKKQLCKYLYTRGIIETEEQVTGVDVSINSALTTYGKFKPIFGEDISKDSVQKMIEDIVFWCTVYGDSRKFLKARIEEKYGNKLSEEQIKRILGFKFKDWGNLSKKFLELNGADTSTGESISIIRALWNNNLNLMELINSSLYNYKECLAEYQNTMLKTLSEIEAEDLNEYYFSAPVRRMIWQTILVIKELVKVLGCEPERIFVEMTRKPDEHKTRTSSRRNKFEELYKKVKDETTDWMQVIANAEEDGKIRSKKMYLYLTQKGRCMYTGKHIELDDLFDNNLYDIDHIYPRHFVKDDNIDNNLVLVCKEKNAHKSDHYPIEEEIFLSQKKMWLELRKSGFITEEKYNRLMDRNPFSDEQKAGFIARQLVETSQGTKGVANILRQLLPGSKIVYAKASNVSEFRHTRDDIPKSRLVNDFHHAHDAYLNIVVGNVYYVKFTQNPLNFIKKDYDNYKEDYNLSKMFDWDVKRNGEVAWIAQRKDGEAGTITTVKKMLSRNTPLMTRYSFEGKGGLANETLYSAKKAKGEGYIPFKSSDDKMQDVTKYGGFTKVAGAYFFLVEHTEKKKRIRTIESVPVYLTRKIEQKPGELKKYCDEILGLVDADIRLKKIKIGSLIKRNGYFCYITGKTGNQLSVRNAVNLCLKNEWIKYISKLEKVKEKDTIDKIITKE

SEQ ID NO: 3114 - protein, 1352 aa, Unknown
  Description of Unknown: uncultivated organism sequence
  Category: MG91 effectors
  Description: MG91-306 effector
MQEKPYYLGLDMGTNSVGWAVTDQHYNLLKAKGKDLWGIREFIEADTSVERRTHRISRRRRQREQARIGLLNDYFHDAIIAIDPSFFQRLENSKYHLEDKDQNVRYKYNIFNDPDYTDADYYTQYPTIYHLRKELLENPKPHDVRLVYLALLNMFKHRGHFLNSGISDGNNERSLKDAYINFAISVSELTEDYFNQDVDYSTIEGILSSRDLNRTKKAEELSTVLGIDFKNKKYKEYLRAICGLKINAYTLFSDQLPDDTTKIDLCVSDASFDEKSEELVSLIGEDLFQIILNIKEIYDIGSLAGILKGYTYLSQARVAAYDKHKHDLKLLKSSIKKYCTKEEYNNFFNSDADGSYASYIGSFNSGNKERRVGSKRTSEDLYKEIKKLLKGANKSDPAINEIFTSIETESFLPKQLTASNGIIPNQVHSKEMARILTNAENYLPFLKETDENNLSISNRILQLYKFQIPYYIGPVTEKSQRDGGNGWVIRKDNGRVFPWNIEEKIDVKATSEAFISRMVRRCTYMNGKQVLPKASLEYESFRVLNEINNLRIDGERIPVTLKQDIYTDLFQKGKKVTKKQLCNYLATRGLIESSEQVTGIDIAINNSLSTYGKFKAIFGEDIKLDHIQHMIEDIVFWCTVYGDSKQFLKEQIEDKYKGKLSPEQMKRILGFKFKDWGNLSKEFFELKGADKSTGEAVSIIRALWENNLNLMELINSSEFDFKEQLADYEANSLKTLSDFEPEDLNDYYFSAPVRRMIWQTTLIIKELVHVLGKEPARIFIEMTREKDASRGRTLSRKKKFEDLYKNVKDENTDWAKVIEHADESGTIRSKKMYLYLTQKGRCMYTGNHIELSDLFNDNLYDIDHIYPRHFVKDDNIDNNLVLVTKEKNAHKSDNYPLEAEIFNKQRNMWTQLRKEGFISEEKYNRLMGRNAFTDEQKAGFIARQLVETSQGTKGVAELFHQLLPNSKIVYAKAGNVSDFRRNRELPKSRLVNDFHHAHDAYLNIVVGNVYYVKFTQNPINYIKNSYNKDMNKNNYNLSRMFDWDVKRGDEVAWIAQKQDGAAGTISTVKKMLSKNTPLMTRLSYEGKGALANETLYSAEKAKGEGYIPFKSSDTKIQDVTKYGGFTSVTGAYFFLVEHDEKKKRIRTIESVPLYLADKIDKDSSELERYCDKLGLVNYDVRVRKIKIGSLIKYNGYFCYITGKTGYRLIVRNATNLCLASNWRKYIKKIEKYKETTIIDNVITAEENIKLYNELLNKFTVGIFGRRPNPIGEKMDSARDKFASLSIENQCLALYQILQLTAILGNESDLQLIGASTHAGKMLISKKIGTDEIYLINQSPTGLFETKIDLQTI

SEQ ID NO: 3115 - protein, 1342 aa, Unknown
  Description of Unknown: uncultivated organism sequence
  Category: MG91 effectors
  Description: MG91-307 effector
MRYFMGLDMGTSSVGWAVTDEHYQLLRRKGKDMWGIREFEEAATAVERRTHRVSRRRRQRQVARIGLLQEYFHDAIHQVDPNFYQRLKNSKYHEEDKDEIVRESNGIFNDAEYTDKEYFKEFPTIFHLRQELIKSKEPHDVRLVYLALLNMFKHRGHFLNATLSADGESRKIKDIYTDFVDKAAEQLGVSFATDIRYEELENYLSSNDLSRKRKGELIAELLHVTRKDKQQYALIECMLGLDKSVKLMFGDTLPEDFDKTIKVNFSDIAFEEKATEISEAIGEEKYDLILIMKEIYDAAILNRIMNGYTYLSDARVAEYEKHKSDLACLKHYIKEYGTQHQFDFLFRGTEKGSYSAYVHSVNSHEKQRRNMDGNKKEDLYSTLKKMLKDMPENEEKTYIMMQIELDNFLPKQLTASNGVIPNQIHLKEMKKILANAENYLPFLKEKDESGYTVSERIQKLFAFQIPYYIGPTTEKSAEFGGNGWVVRKEEGKVLPWNIDQKIDMKKTSEKFISRMVRRCTYMNDEQVLPKESLEYESFCVLNELNNIKVYGEKLPVDIKQDIYRTLCEKGKRITKKSLMQYLVGRGVIKAEDEEQLTGLMDGLNNTLKSFAKFKAIFGDAIYEDSCKKMVEQIIFWCTVYGDSKHFLKEQLLEKYGEVLTDAQIKRILGIKFRDWGNLSKKFLELQGCSKETGEVNSLIRMLWETNDNLMELLAQDSYTFKEELENMQESTYKVLAELQPEDLDHMYFSAPVKRMIWQTILIIKEVTKVIGCQPERLFIEMTREHGQKNDIKDSRAKKFYELYSKIKDEDKDWRKVIEDADKDGRIRSKKMYLYLTQMGRCMYTGRPIELDQLFNNNLYDIDHIYPRHYVKDDNLENNMVLVEKQSNAHKSDVYPLESGIYEKQVNWWRELHRKNLINDEKLKRLTGRNPFTDEQKAGFIARQLVETSQGTKGVATILQEALPDTTLVYAKARNVSEFRSDNDLLKSRIVNDFHHAHDAYLNIVIGNVYYVKFTKNPINFIREHGTYNLGKMFAKDVKRGDDIGWVAQSGNGQTATMETIKRTMARNTPLLTRMSYEVTGGLANQTLYSASKAKEGTYIPLKSSDERMQDVTKYGGFTSVSTAYFMLVEHDGKKGKRIRTIESVPIMWKERIEKNPAELERYCLEVLKLSNPDIRVRKILIQSLIKRNGYYMQITGKTGNRMYVRNMVSLCLVQDWVNYIKKLEKDKDENISKEKNIRLYDVLMDKHINTIYNTRPNPVGDLLIKRRSDFIELKITDQVIILLEILKLTQTALGSANLKLIGEAEKTGVMLISKDITALDEMLLINQSVTGLYEQRVNLLTV

SEQ ID NO: 3116 - protein, 1358 aa, Unknown
  Description of Unknown: uncultivated organism sequence
  Category: MG91 effectors
  Description: MG91-308 effector
MEKEYYLGLDMGTNSVGWAVTDDAYNLIRFKGKDMWGIREFDEANPAVERRTHRTSRRREQRNAVRMGLIRSYFADEIQKVDSNFYQRLDNSFFYVEDKQDNVKDKNGIFNDKNYKDADYYKQYPTIFHLRKELIEDASQKDVRLVYLAVANMFKHRGHFLLSGIGSESSKQTITDLYNQVSGLITEEYGISLKTDIAGTDFEQVLCSREYSRTRKSEKVCEILEIKNSDKLKKAFVKSMCGLSVKITDIIDDTFTEISDEDKKITFSFVDSDYDEKAGVLEEKLGTDVYDIISKLKEIHDKAQVAEIMKNYQYLSFARVADYEKHKKDLKILKRVVKKYFEPTVYDKLFRSEENGTYSAYVNSFNSEEKSRRNYKERKQEDLYNSIKKLLKSVDNVDDTDIEYIKNEMDKENFLPKQLTFKNGVIPNQIHASELKAILKNAEKYLPFLNEKDESGYTVSERILMLFSFQIPYYVGPVSSNSNGWVKRLEPGQVLPWNIDKKIDLKETSEQFIQRMVRNCTYIAGEKVLPKASLLYENFKVLNEINNLSINGERITVNLKQDLYNTLFLKGKRVTRKQIFNYFHSRGLVEEDSQISGIDIAVNNSLSTYGKFLPLFGEHLKEDKYKKMVDDIVFWCTVYGDSRKFLREQLEEKYSDVLDENQIKRITGMKFKDWGNLSKEFLELSGCCKSTGEVMPLIRAMWETNYNLMELLHSEEFTYSEELEEKQGKIEKVLSEYTIDDLNEEYFSAPVKRMVWQTLLIIKEIEKIMKCPPTRIFVEMTRKDDEKGDNGRKSSRKDQLLALYKKIQSEDKEWKKEMSSRIEDYDKNGALRSKKLYLYFIQKGLDMYTGKPIDLDNLMSANSNYDIDHIYPRHFVKDDNINNNLVLASKPANAEKSDIYPIKDSIYQKMKYTWKVLRDEGLITEEKYKRLTGRNPFTDEQKAGFIARQLVETGQGTKGVADLLTALLPDTKLVYSKAGNVSDFRKRYDIPKSRLINDFHHAHDAYLNIVVGNIYFTKFTSNPLNYIRKECSSKDNKYQYNLGNMYKWDVKRDGKTAWVAPEEGETGTLATVKKMLSRNTPILTRLTIEGHGGIADATLYSHKKAKQDTYIPLKSSDARMADVTKYGGYSSVTTAYLFLVEHEIKGKKIRTLETVPLYLKDRLENSKEKLEEYCRETLGYTNPSVRMKKIKLQSLIKLNGYYMQISGKTNKQFTVRNYVQFCLNSKWVDYIHKLEKYQDKGVIDDAITDEKNVELYNVLCEKHSVGIFTLRPNPVGDKIKKGYDKFVNLTTEEQIKLLIEIIKLTCVGIVSANLTLIGGASISGKMLISKNITDAKECLLINQSVTGLYENRIDLLRV

SEQ ID NO: 3117 - protein, 1358 aa, Unknown
  Description of Unknown: uncultivated organism sequence
  Category: MG91 effectors
  Description: MG91-309 effector
MEKEYYLGLDMGTNSVGWAVTDDAYNLIRFKGKDMWGIREFDEANPAVERRTHRTSRRREQRNAVRMGLIRSYFADEIQKVDSNFYQRLDNSFFHVEDKQDNVKDKNGIFNDKNYKDADYYKQYPTIFHLRKELIEDASQKDVRLVYLAVANMFKHRGHFLLSGIGSESSKQTITDLYNQVSGLITEEYGISLKTDIAGTDFEQVLCSREYSRTRKSEKVCEILEIKNSDKLKKAFVKSMCGLSVKITDVIDDTFTEISDEDKKITFSFVDSDYDEKAGVLEEKLGTDVYDIISKLKEIHDKAQVAEIMKNYQYLSFARVADYEKHKKDLKILKRVVKKYFEPTVYDKLFRSGENGTYSAYVNSFNSGEKSRRNYKERKQEDLYNSIKKLIKSIDNVCDTDIEYIKNEIEKENFLPKQLTFKNGVIPNQIHASELKAILKNAEKYLPFLNEKDESGYTVSERILMLFSFQIPYYVGPVSPNSNGWVKRLEPGQVLPWNIDKKIDLKETSEQFIQRMVRNCTYIAGEKVLPKASLLYENFKVLNEINNLSINGERIAVALKQDLYNTLFLKGKRVTRKQIFNYFHSRGLVEEDSQISGIDIAVNNSLSTYGKFLPLFGEHLKEDKYKKMVDDIVFWCTVYGDSRKFLREQLEEKYSDVLDENQIKRITGMKFKDWGNLSKEFLELSGCCKSTGEMIPLIRAMWETNYNLMELLHSEEFTYSEELEEKQGKIEKVLSEYTIDDLNEEYFSAPVKRMVWQTLLIIKEIEKIMKCPPTRIFVEMTRKDDEKGDNGRKSSRKDQLLALYKKIQSEDKEWKKEMSSRIEDYDKNGALRSKKLYLYFIQKGLDMYTGKPIDLDNLMSANSNYDIDHIYPRHFVKDDNINNNLVLASKPANAEKSDIYPIKDSIYQKMKYTWKVLRDEGLITEEKYKRLTGRNPFTDEQKAGFIARQLVETGQGTKGVADLLTALLPDTKLVYSKAGNVSDFRKRYDIPKSRLINDFHHAHDAYLNIVVGNIYFTKFTSNPLNYIRKECSSKDNKYQYNLGNMYKWDVKRDGKTAWIAAKEGETGTIATVKKILSRNTPTLTRLTIEGHGGIADATLYSHKKAKQDAYIPLKSSDARMADVTKYGGYSSVTTAYLFLVEHEIKGKKIRTLETVPLYLKDRLENSKEKLEEYCRESLGYTNPSVRMKKIKLQSLIKLNGYYMQISGKSIKQFEVRNYVQICLNGKWVDYIHKLEKYQDKGVIDNAITDEKNVELYNILCEKHSVGIFTLRPNPVGDKIKKGYDKFVNLTTEEQIKLLIEIIKLTCVGIVKADLRLIGASEKSGTMKINKNITDAKECFLINQSVTGLYENRIDLLRV

SEQ ID NO: 3118 - protein, 1352 aa, Unknown
  Description of Unknown: uncultivated organism sequence
  Category: MG91 effectors
  Description: MG91-310 effector
MQEKPYYLGLDMGTNSVGWAVTDQHYNLLKAKGKDLWGIREFIEADTSVERRTHRISRRRRQREQARIGLLNDYFHDAIIAIDPSFFQRLENSKYHLEDKDQNVRYKYNIFNDPDYTDADYYTQYPTIYHLRKELLENPKPHDVRLVYLALLNMFKHRGHFLNSGISDGNNERSLKDAYINFAISVSELTEDYFNQDVDYSTIEGILSSRDLNRTKKAEELSTVLGIDFKNKKYKEYLRAICGLKINAYTLFSDQLPDDTTKIDLCVSDASFDEKSEELVSLIGEDLFQIILNIKEIYDIGSLAGILKGYTYLSQARVAAYDKHKHDLKLLKSSIKKYCTKEEYNNFFNSDADGSYASYIGSFNSGNKERRVGSKRTSEDLYKEIKKLLKGANKSDPAINEIFTSIETESFLPKQLTASNGIIPNQVHSKEMARILTNAENYLPFLKETDENNLSISNRILQLYKFQIPYYIGPVTEKSQRDGGNGWVIRKDNGRVFPWNIEEKIDVKATSEAFISRMVRRCTYMNGKQVLPKASLEYESFRVLNEINNLRIDGERIPVTLKQDIYTDLFQKGKKVTKKQLCNYLATRGLIESSEQVTGIDIAINNSLSTYGKFKAIFGEDIKLDHIQHMIEDIVFWCTVYGDSKQFLKEQIEDKYKGKLSPEQMKRILGFKFKDWGNLSKEFFELKGADKSTGEAVSIIRALWENNLNLMELINSPEFDFKEQLADYEANSLKTLSDFEPEDLNDYYFSAPVRRMIWQTTLIIKELVHVLGKEPARIFIEMTREKDASRGRTLSRKKKFEDLYKNVKDENTDWAKVIEHADESGTIRSKKMYLYLTQKGRCMYTGNHIELSDLFNDNLYDIDHIYPRHFVKDDNIDNNLVLVTKEKNAHKSDNYPLEAEIFNKQRNMWTQLRKEGFISEEKFNRLMGRNAFTDEQKAGFIARQLVETSQGTKGVAELFHQLLPNSKIVYAKAGNVSDFRRNREFPKSRLVNDFHHAHDAYLNIVVGNVYYVKFTQNPINYIKNSYNKDMNKNNYNLSRMFDWDVKRGDEVAWIAQKQDGAAGTISTVKKMLSKNTPLMTRLSYEGKGALANETLYSAEKAKGEGYIPFKSSDTKIQDVTKYGGFTSVTGAYFFLVEHDEKKKRIRTIESVPLYLADKIDKDSSELERYCDKLGLVNYDVRVRKIKIGSLIKYNGYFCYITGKTGYRLIVRNATNLCLASNWRKYIKKIEKYKETTIIDNVITAEENIKLYNELLNKFTVGIFGRRPNPIGEKMDSARDKFASLSIENQCLALYQILQLTAILGNESDLQLIGASTHAGKMLISKKIGTDEIYLINQSPTGLFETKIDLQTI

SEQ ID NO: 3119 - protein, 1342 aa, Unknown
  Description of Unknown: uncultivated organism sequence
  Category: MG91 effectors
  Description: MG91-311 effector
MRYFMGLDMGTSSVGWAVTDEHYQLLRRKGKDMWGIREFEEAATAVERRTHRVSRRRRQRQVARIGLLQEYFHDAIHQVDPNFYQRLKNSKYHEEDKDEIVRGSNGIFNDAEYTDKEYFKEFPTIFHLRQELIKSKEPHDVRLVYLALLNMFKHRGHFLNATLSADGESRKIKDIYTDFVDKAAEQLGISFATDIKYEELENYLSSNDLSRKRKGELIAELLHVTRKDKQQYALIECMLGLDKSVKLMFGDTLPEDFDKTIKVNFSDIAFEEKATEISEAIGEEKYDLILIMKEIYDAAILNRIMNGYTYLSDARVAEYEKHKSDLACLKHYIKEYGTQHQFDFLFRGTEKGSYSAYVHSVNSHEKQRRNMDGNKKEDLYSTLKKILKDMPENEEKTHIMMQIELDNFLPKQLTASNGVIPNQIHLKEMKKILANAENYLPFLKEKDESGYTVSERIQKLFAFQIPYYIGPTTEKSAEFGGNGWVVRKEEGKVLPWNIDQKIDMKKTSEEFISRMVRRCTYMNDEQVLPKESLEYESFCVLNELNNIKVYGEKLPVDIKQDIYRTLCEKGKRITKKSLMKYLVGRGVIKAEDEEQLTGLMDGLNNTLKSFAKFKAIFGDAIYEDSCKKMVEQIIFWCTVYGDSKHFLKEQLLEKYGEVLTDAQIKRILGIKFRDWGNLSKKFLELQGCSKETGEVNSLIRMLWETNDNLMELLAQDSYTFKEELENMQESTYKVLAELQPEDLDHMYFSAPVKRMIWQTILIIKEVTKVIGCQPERLFIEMTREHGQKNDIKDSRAKKFYELYSKIKDEDKDWRKVIEDADKDGRIRSKKMYLYLTQMGRCMYTGRPIELDQLFNNNLYDIDHIYPRHYVKDDNLENNMVLVEKQSNAHKSDVYPLESGIYEKQVNWWRELHRKNLINDEKLKRLTGRNPFTDEQKAGFIARQLVETSQGTKGVATILQEALPDTTLVYAKARNVSDFRKDNDLLKSRIVNDFHHAHDAYLNIVIGNVYYVKFTKNPINFIREHGTYNLGKMYAKDVKRGDEIAWVAQSGNGQTATMETIRRTMARNTPLLTRMSYEVTGGLANQTLYSANTAKEGTYIPLKSSDERMQDVTKYGGFTSVSTAYFMLVEHDGKKGKRIRTIESVPIMWKERIEKNPVELERYCLEVLKLSNPDIRVRKILIQSLIKRNGYFMYITGKTNKQLSVRNKVSLCLTQNWVNYIKNLENDNDDNITKKENLELYDILSDKHNNTIYRQRPNPVGSKLHKCRDRFINLKMNEQKVVLLEILKLTQIASTSANLELLGESKQTGVMFIGKDITALDEILLINQSVTGLYEQRVNLLTV

SEQ ID NO: 3120 - protein, 1352 aa, Unknown
  Description of Unknown: uncultivated organism sequence
  Category: MG91 effectors
  Description: MG91-312 effector
MTAFKYYLGLDMGTNSVGWAATDPEYRLLKAKGKDLWGIREFNEASGAVERRTHRISRRRRQREQVRIGILKDYFHDAICEVDPSFFQRLENSKYHEEDKDVEVRYKNNIFNDSNYTDKDYFNEYPTIYHLRNELISSTEKHDVRLVFLALLNMFKHRGHFLNAGLGENNGESNIDNAYFELTELLSELTEYHLSQDIDCKQIEAILSRRDMSRTHKAEELAGVLHVDLKNKPYKELIRGLCGLKFNACVVFPDVQSEEVTKLDICLSESTFDEKSDEIANIIGEDYFEIIMAMKEMFDIGSLASIMKGHNYLSQARVASYTKHKEDLKLLKEVIKKYCGKKEYDKFFNSDADGSYASYVGSYNSKKKERRVGNKRTSEELYKEIKKLLKDAQKEDENVQKILTSIENETFLPKQLTASNGVIPNQVHAREMKKILSNAENYLPFLTKKDETGLSVSERILKLFTFQIPYYIGPTSENSGKNGGNGWVVRREDGQVLPWNIDEKIDMKATSEAFISRMVRRCTYISGEQVLPKASLEYQSYCVLNEINNIKIDGERISVELKQDIYKAVFQKGKKVTKKQLCKYLHTRGIIETEEQVTGVDVSINNALTTYGKFKPIFGEDISKDSVQKMIEDIVFWCTVYGDSKKFLKDRIEEKYGNKLSEEQIKRILGFKFKDWGNLSKKFLELNGADTSTGESISIIRALWNNNLNLMELINSSLYNYKECLAEYQNTMLKTLSEIEAEDLNEYYFSAPVRRMIWQTILVIKELVKVLGCEPERIFVEMTRKPDEHKTRTSSRRNKFEELYKKVKDETTDWMQVIANAEEDGKIRSKKMYLYLTQKGRCMYTGKHIELDDLFDNNLYDIDHIYPRHFVKDDNIDNNLVLVCKEKNAHKSDHYPIEEEIFLSQKKMWLELRKSGFITEEKYNRLMDRNPFSDEQKAGFIARQLVETSQGTKGVANILRQLLPGSKIVYAKASNVSEFRHTRDDIPKSRLVNDFHHAHDAYLNIVVGNVYYVKFTQNPLNFIKKDYDKYKEDYNLSKMFDWDVKRNGEVAWIAQRKDGEAGTITTVKKMLSRNTPLMTRYSFEGKGGLANETLYSAKKAKGEGYIPFKSSDDKMQDVTKYGGFTSVTGAYFFLVEHTEKKKRIRTIESVPVYLAQKIEQNPDELKKYCEEILGLIDADIRLKKIKIGSLIKRNGYFCYITGKTGKQLIVRNAVNLCLKNEWIKYISKLEKVKEIDAVDKIITKEKNEVLYSELIQKFKHGIFSKRPNPVGDKLEKGSEKFSNLSIKEQCAVLCQILQLAAVLGSECDMTLLGESAHCGKMLISKKIGDEEIYLINQSVTGLYEKKINLHTV

SEQ ID NO: 3121 - protein, 1351 aa, Unknown
  Description of Unknown: uncultivated organism sequence
  Category: MG91 effectors
  Description: MG91-313 effector
MAAYYLGLDMGTSSVGWAVTNEQYELIKKKGKDLWGIREFDEAHTAVDRRMMRVSRRRRQRELARIGLLKEYFQDAIAEVDPNFYARLENSKYHLEDKDVSVRTYNGIFADKDYTDKEYFAEYPTIFHLRKELLESQEPHDVRLVYLALVNMFKHRGHFLNATLSSDSENRSIKDVWNEFAEQVYELLGISFSDEIDYMALQEIMCSTDISRKKKAEELVQLLKIDKKEKQKIALLECVIGLNVSIKTIFGACISDDFDPKMKISFSDAGYEEKIVDIQEVLGDENFELIAGMKALYDAAILNQIMGGNAYLSIARVQEYEKHKSDLKILKSIYRKYATKKDYDDMFRSTEKGSYSAYTNSTNSDKVANAENGGEPVRRGIEGRKKEDLYANIKKKLAEMPEDVQYVLNEIEKDHFLPKQLTASNGVIPNQIHLKEMKKILSNAENYLLFLKEKDESGYTTTERILKLFSFQIPYYVGPVTEKSARDGGNGWVVRKEDGVVLPWNINEKIDMKKTSEAFISRMVRRCTYMSGEQVLPKASLEYESFCVLNELNNLKVRGEKLPIEIKQNMYKDLFETGKRVTKNKIVKYLIGQGVLCEGNEDELTGLMDGINGTLSSFAKFRAVFGDAIYEDSCKKMVEQIIFWCTVYGDSKSFLKEQLEEKYAKDLTPEQMKRILGFKFKDWGNLSKEFLELNGCKKDTGEAASLIRMMWETNDNLMELLAKDKYTYQEKLQESQEKSYKILSEMQPEDLEDYYFSAPVKRMVWQTLLVIKEIEKVMGEPPKRLFVEMTRSEDKKKEMKDSRTKKFLELYKKIKDEDKDWKKIIESADEDGRIRSKKMYLYLTQKGRCMYTGRPIDLDQLFNNNLYDIDHIYPRHFVKDDNLENNLVLVEKEKNARKSDTYPLDEEIYKKQLNWWRELHQQNLINDEKFKRLTGRNPFSDEQKAGFIARQLVETSQGTKGVATILKEVLPEETTIVYAKARNVSDFRHDYNLLKSRIVNDFHHAQDAYLNIVVGNVYYVKFTQNPMNFIRENKSYNLGKMFAWDVKRGNETAWIAKPENGSAATIATVRKVMAKNTPLLTRLSFEGSGGIANQTLYSAKKTKEEGYIPLKSSDPKMQDIKKYGGYTSVTTAYFILVEHGTEKKRIRTIESVTLIWKDRIEKNPDELQVYCEKVLGLINPDIRVRKILIQSLIKREGYYMHISGKTENRLTLRNAVSLCLKTTWINYIKKLEKGEKTEEITKTSNIALYEELMRKHKETIYAKRPNPVGDKLLYGEDKFEKLELETQIKILLEILKLTQIGLPEADLREIGGAKSTGTIKVGKKISGLHELKLIHQSVTGIYEQQVDLLTV

SEQ ID NO: 3122 - protein, 1352 aa, Unknown
  Description of Unknown: uncultivated organism sequence
  Category: MG91 effectors
  Description: MG91-314 effector
MTAFKYYLGLDMGTNSVGWAATDPGYRLLKAKGKDLWGIREFNEASGAVERRTHRISRRRRQREQVRIGILKDYFHDAICEVDPSFFQRLENSKYHEEDKDVEVRYKNNIFNDSNYTDKDYFNEYPTIYHLRNELISSTEKHDVRLVFLALLNMFKHRGHFLNAGLGENNGESNIDNAYFELTELLSELTEYHLSQDIDCKQIEAILSRRDMSRTHKAEELAGVLHVDLKNKPYKELIRGLCGLKFNACVVFPDVQSEEVTKLDICLSESTFDEKSDEIANIIGEDYFEIIMAMKEMFDIGSLASIMKGHNYLSQARVASYTKHKEDLKLLKEVIKKYCGKKEYDKFFNSDADGSYASYVGSYNSKNKERRVGNKRTSEELYKEIKKLLKDAQKEDENVQKILTSIENETFLPKQLTASNGVIPNQVHAREMKKILSNAENYLPFLTEKDETGLSVSERILKLFTFQIPYYVGPTSENSGKNGGNGWVVRREDGQVLPWNIDEKIDMKATSEAFISRMVRRCTYISGEQVLPKASLEYQSYCVLNEINNIKIDGERISVELKQDIYKAVFQKGKKVTKKQLCKYLHTRGIIETEEQVTGVDVSINNALTTYGKFKPIFGEDISKDSVQKMIEDIVFWCTVYGDSKKFLKDRIEEKYGNKLSEEQIKRILGFKFKDWGNLSKKFLELNGADTSTGESISIIRALWNNNLNLMELINSSLYNYKECLAEYQNTMLKTLSEIEAEDLNEYYFSAPVRRMIWQTILVIKELVKVLGCEPERIFVEMTRKPDEHKTRTSSRRNKFEELYKKVKDETTDWMQVIANAEEDGKIRSKKMYLYLTQKGRCMYTGKHIELDDLFDNNLYDIDHIYPRHFVKDDNIDNNLVLVCKEKNAHKSDHYPIEEEIFLSQKKMWLELRKSGFITEEKYNRLMDRNPFSDEQKAGFIARQLVETSQGTKGVTNILRQLLPGSKIVYAKASNVSEFRCTRDDIQKSRLVNDFHHAHDAYLNIVVGNVYYVKFTQNPLNFIKKDYDKYKEDYNLSKMFDWDVKRNGEVAWIAQRKDGAAGTITTVKRMLSRNTPLMTRYSFDGKGGLTNETLYSAKKAKGEGYIPFKSSDDKMQDVTKYGGFTSVTGAYFFLVEHTEKKKRIRTIESVPVYLAQKIEQNPDELKKYCEEILGLIDADIRLKKIKIGSLIKRNGYFCYITGKTVNRLIVRNAVNLCLKNEWIKYISKLEKVKEKDAVDKIITKEKNEVLYSELIQKFKHGIFSKRPNPVGDKLEKDSEKFNNLSIKDQCAVLCQVLRMAAILGSECDMTLLGDSPNCGKMLISKKIGDEEIYLINQSVTGLYEKKINLHTV

SEQ ID NO: 3123 - protein, 1352 aa, Unknown
  Description of Unknown: uncultivated organism sequence
  Category: MG91 effectors
  Description: MG91-315 effector
MTAFKYYLGLDMGTNSVGWAATDPEYRLLKAKGKDLWGIREFNEASGAVERRTHRISRRRRQREQVRIGILKDYFHDAICEVDPSFFQRLENSKYHEEDKDVEVRYKNNIFNDSNYTDKDYFNEYPTIYHLRNELISSTEKHDVRLVFLALLNMFKHRGHFLNAGLGENNGESNIDNVYFELTELLSELTEYHLSQDIDCKQIEAILSRRDMSRTHKAEELAGVLHVDLKNKPYKELIRGLCGLKFNACVVFPDVQSEEVTKLDICLSESTFDEKSDEIANIIGEDYFEIIMAMKEMFDIGSLASIMKGHNYLSQARVASYTKHKEDLKLLKEVIKKYCGKKEYDKFFNSDADGSYASYVGSYNSKNKERRVGNKRTSEELYKEIKKLLKDAQKEDENVQKILTSIENETFLPKQLTASNGVIPNQVHAREMKKILSNAENYLPFLTEKDETGLPVSERILKLFTFQIPYYVGPTSENSGKNGGNGWVVRREDGQVLPWNIDEKIDMKATSEAFISRMVRRCTYISGEQVLPTASLEYQSYCVLNEINNIKIDGERISVELKQDIYKAVFQKGKKVTKKQLCKYLHTRGIIETEEQVTGVDVSINNALTTYGKFKPIFGEDISKDSVQKMIEDIVFWCTVYGDSKKFLKDRIEEKYGNKLSEEQIKRILGFKFKDWGNLSKKFLELNGADTSTGESISIIRALWNNNLNLMELINSSLYNYKECLAEYQNTMLKTLSEIEAEDLNEYYFSAPVRRMIWQTILVIKELVKVLGCEPERIFVEMTRKPDEHKTRTSSRRNKFEELYKKVKDETTDWMQVIANAEEDGKIRSKKMYLYLTQKGRCMYTGKHIELDDLFDNNLYDIDHIYPRHFVKDDNIDNNLVLVCKEKNAHKSDHYPIEEEIFLSQKKMWLELRKSGFITEEKYNRLMGRNPFSDEQKAGFIARQLVETSQGTKGVANILRQLLPGSKIVYAKASNVSEFRRTRDDIPKSRLVNDFHHAHDAYLNIVVGNVYYVKFTQNPLNFIKKDYDNYKEDYNLSKMFDWDVKRNGEVAWIAQRKDGEAGTITTVKKMLSRNTPLMTRYSFEGKGGLANETLYSAKKAKGEGYIPFKSSDDKMQDVTKYGGFTSVTGAYFFLVEHAEKKKRIRTIESVPVYLAQKIEQNPDELKKYCEEILGLIDADIRLKKIKIGSLIKRNGYFCYITGKTGKQLIVRNAVNLCLKNEWIKYISKLEKVKEKDAVDKIITKEKNEVLYSELIQKFKHGIFSKRPNPVGDKLEKGSEKFSNLSIKEQCTVLCQILQLAAVLGSECDMTLLGESAHCGKMLISKKIGDEEIYLINQSVTGLYEKKINLHTV

SEQ ID NO: 3124 - protein, 1352 aa, Unknown
  Description of Unknown: uncultivated organism sequence
  Category: MG91 effectors
  Description: MG91-316 effector
MTAFKYYLGLDMGTNSVGWAATDPEYRLLKAKGKDLWGIREFNEASGAVERRTHRISRRRRQREQVRIGILKDYFHDAICEVDPSFFRRLENSKYHEEDKDVEVRYKNNIFNDGNYTDKDYFNEYPTIYHLRNELISSTEKHDVRLVFLALLNMFKHRGHFLNAGLGENNGESNIDNAYFELTELLSELTEYHLSQDIDCKQIEAILSRRDMSRTHKAEELAGVLHVDLKNKPYKELIRGLCGLKFNACVVFPDVQSEEVTKLDICLSESSFDEKSDEIANIIGEDYFEIIMAMKEMFDIGSLASIMKGHNYLSQARVASYTKHKEDLKLLKEVIKKYCGKKEYDKFFNSDADGSYASYVGSYNSKNKERRVGNKRTSEELYKEIKKLLKDAPKEDENVQKILTSIENETFLPKQLTASNGVIPNQVHAREMKKILSNAENYLPFLTEKDETGLSVSERILKLFTFQIPYYVGPTSENSGKNGGNGWVVRREDGQVLPWNIDEKIDMKATSEAFISRMVRRCTYISGEQVLPKASLEYQSYCVLNEINNIKIDGERISVELKQDIYKAVFQKGKKVTKKQLCKYLHTRGIIETEEQVTGVDVSINNALTTYGKFKPIFGEDISKDSVQKMIEDIVFWCTVYGDSKKFLKDRIEEKYGNKLSEEQIKRILGFKFKDWGNLSKKFLELNGADTSTGESISIIRALWNNNLNLMELINSSLYNYKECLAEYQNTMLKTLSEIEAEDLNEYYFSAPVRRIIWQTILVIKELVKVLGCEPERIFVEMTRKPDEHKTRTSSRRNKFEELYKKVKDEATDWMQVIAKAEEDGKIRSKKMYLYLTQKGRCMYTGKHIELDDLFDKNLYDIDHIYPRHFVKDDNIDNNLVLVCKEKNAHKSDHYPIEEEIFLSQKKMWLELRKSGFITEEKYNRLMGRSPFSDEQKAGFIARQLVETSQGTKGVANILRQLLPGSKIVYAKASNVSEFRHTRDDIPKSRLVNDFHHAHDAYLNIVVGNVYYVKFTQNPLNFIKKDYDKYKEDYNLSKMFDWDVKRNGEVAWIAQRKDGEAGTITTVKRMLSRNTPLMTRYSFEGKGGLANETLCSAKKAKGEGYIPFKSSDDKMQDVTKYGGFTKVTGAYFFLVEHTEKKKRIRTIESVPVYLAQKIEQNPDELKKYCEEILGLVDADIRLKKIKIGSLIKRNGYFCYITGKTGNRLSVRNAVNLCLKNEWIKYISKLEKVKEKDAVDEIITKEKNEVLYSELIQKFKHGIFSKRPNPVEDKLEKGSEKFSNLSIKEQCAVLCQILQLAAVLGSECDMTLLGDSPNCGKMLISKKIGDEEIYLLNQSVTGLYEKKINLHTV

SEQ ID NO: 3125 - protein, 1352 aa, Unknown
  Description of Unknown: uncultivated organism sequence
  Category: MG91 effectors
  Description: MG91-317 effector
MTAFKYYLGLDMGTNSVGWAATDPEYRLLKAKGKDLWGIREFNEASGAVERRTHRISRRRRQREQVRIGILKDYFHDAICEVNPSFFRRLENSKYHEEDKDVEVRYKNNIFNDGNYTDKDYFNEYPTIYHLRNELISSTEKHDVRLVFLALLNMFKHRGHFLNAGLGENNGESNIDNAYFELTELLSELTEYHLSQDIDCKQIEAILSRRDMSRTHKAEELAGVLHVDLKNKPYKELIRGLCGLKFNACVVFPDVQSEEVTKLDICLSESSFDEKSDEIANIIGEDYFEIIMAMKEMFDIGSLASIMKGHNYLSQARVASYTKHKEDLKLLKEVIKKYCGKKEYDKFFNSDADGSYASYVGSYNSKNKERRVGNKRTSEELYKEIKKLLKDAPKEDENVQKILTSIENETFLPKQLTASNGVIPNQVHAREMKKILSNAENYLPFLTEKDETGLSVSERILKLFTFQIPYYVGPTSENSGKNGGNGWVVRREDGQVLPWNIDEKIDMKATSEAFISRMVRRCTYISGEQVLPKASLEYQSYCVLNEINNIKIDGERISVELKQDIYKAVFQKGKKVTKKQLCKYLHTRGIIETEEQVTGVDVSINNALTTYGKFKPIFGEDISKDSVQKMIEDIVFWCTVYGDSKKFLKDRIEEKYGNKLSEEQIKRILGFKFKDWGNLSKKFLELNGADTSTGESISIIRALWNNNLNLMELINSSLYNYKECLAEYQNTMLKTLSEIEAEDLNEYYFSAPVRRIIWQTILVIKELVKVLGCEPERIFVEMTRRPDEHKTRTSSRRNKFEELYKKVKDEATDWMQVIAKAEEDGKIRSKKMYLYLTQKGRCMYTGKHIELDDLFDKNLYDIDHIYPRHFVKDDNIDNNLVLVCKEKNAHKSDHYPIEEEIFLSQKKMWLELRKSGFITEEKYNRLMGRSPFSDEQKAGFIARQLVETSQGTKGVANILRQLLPGSKIVYAKASNVSEFRHTRDDIPKSRLVNDFHHAHDAYLNIVVGNVYYVKFTQNPLNFIKKDYDKYKEDYNLSKMFDWDVKRNGEVAWIAQRKDGEAGTITTVKRMLSRNTPLMTRYSFEGKGGLANETLCSAKKAKGEGYIPFKSSDDKMQDVTKYGGFTKVTGAYFFLVEHTEKKKRIRTIESVPVYLAQKIEQNPDELKKYCKEILGLVDADIRLKKIKIGSLIKRNGYFCYITGKTGNRLSVRNAVNLCLKNEWIKYISKLEKVKEKDAVDEIITKEKNEVLYSELIQKFKHGIFSKRPNPVEDKLEKGSEKFSNLSIKEQCAVLCQILQLAAVLGSECDMTLLGESAHCGKMLISKKIGDEEIYLLNQSVTGLYEKKINLHTV

SEQ ID NO: 3126 - protein, 359 aa, Unknown
  Description of Unknown: uncultivated organism sequence
  Category: MG91 effectors
  Description: MG91-318 effector
MYNKGGKNTTVSAKVNTNLSPDEKPKDLRGRFLSNQNYRLMKSVLRFSSEYVQGVRRVNDLVEMKCDDTKCKEITTNAKCQGECGKIFNNGKFLFCVYDTSAAAATASSSGEAKFKLVCNLCSNDYSYNNRYEVLQLFPTVSQQVVERLCEIGFLTKYIFPIKLNYTETQTKTEVINYHDFYKMVKSIIKEKKSNEQITEIKLSTYGRDLFVETDDFCVMRKDSNEFNETVYELDFFPKQSSMLEFLKIYKDNKPLTYFYTVKKRVYLSIFDYAVYFPFKCVLFCKVCTKNKMYLKTHPVLYCSKCGFTDPMFFNNSAFLESTIFLAKCVKYKTMPVARIFYYDMTLYKTFIKKPFVKK

SEQ ID NO: 3127 - protein, 1359 aa, Unknown
  Description of Unknown: uncultivated organism sequence
  Category: MG91 effectors
  Description: MG91-319 effector
MRETGKDYYLGLDMGTNSVGWAVTDENYVLMRAKGKDLWGIREFDEALTAVDRRTHRVARRRRQREIARIGLLKEYFHDAIAEVDPDFYQRLDNSKYHEEDKDSAVKGKNGIFNDANYNDKDYFKQYPTIFHLRKELIESTEKHDVRLVYLALLNMFKHRGHFLNAGLSTESENTMDTAYHNFVETAAQTIECNFMETVDIEKIKEILGSRDYSRSKKAELVAQILHVDSKNKVQMACIKCICGLKVTAAAIFGDKMAADEEKKTDICFSDFGYDEKVPVILEIVGEENFELVLAMQEIYDIGSLAGIMKDSLYLSMARVKEYEQHGKDLRILKGVVKKYGTKEEYDTLFRTMEEGTYSAYVNSVNTKKKSRRDVKKRTRDEFYGRLKKIISKMPQNDSDVLYIKDKMEKEAFLPKQLTASNGVIPNQIHAREMKKILQNAEIYLPFLKEKDTSGLTVSERILKLFSFQIPYYVGPVSEKSKLNGGNGWVVRKEEGAVLPWNIEEKIDMTATSREFVERMVRRCSYLSDERVLPKGSLLYERFCVLNEINAIKVDGVKIPVEIKQDLYSKYFKKGKKVTKKKIAEFLIARGVIKEDQTELISGIDIAVNSTLSTYAKFYAIFGEKMEQDSYKKMVEQIVEWCTIYGDAKKFLEQKIKECYGNILTQEEIKRITGFKFRDWGRLSKEFLELSGCSKATGEVMPLISMMWETNDNLMELLDDNYYTYREALEEKQNNAFKLLADIEPEDLDEMYFSAPVKRMVWQTLCIIKELEKVLGKAPKRLFVEMTRNEQKDKKRTDSRKQQFLDLYKNIKDESRDWKELITRADENGTLKSKKMYLYLTQRGRCMYTGHPIDLEDLFKDNRYDIDHIYPRHFVKDDNIMNNLVLVEKEKNAHKSDNYPLEEEIYKKQLPMWKDLHQRKLITDEKFKRLTGRNEFTDEQKAGFIARQLVETSQGTKGVTTILERALPDTKIVYAKASNVSEFRQKRDLLKSRVVNDFHHAQDAYLNIVVGNVYFVKFTQNPLHFIKAEYDKNKAQYEYNLSRMFDRDVRRGNETAWIGCKKGEEAGTILTVKKMMAKNTPMLTRLSFEGKGGLADQTLYSAEKAKGNGYIPLKTSDSKMQDVTKYGGFNSVSTAYFFLVEHELKGKKVRTLETVPIIWRDRIEKDETMLLKYCTDVLELKNPSIRVKKIKLQSYIKKDGYYMYITGKTNKQITTKNAVELCVNQRWIDYIKIIEKTVEKKKEECEEIDYDKNVEFYDLLLTKHTQEIFSNRPNPVGAKLKQGRDKFVSLTLLEQCRVLYEILQLSIIGNTRADLQLIGGAAISGVMLLSKNITDSKEFILINQSVTGLFEQKVDLLTV

SEQ ID NO: 3128 - protein, 1365 aa, Unknown
  Description of Unknown: uncultivated organism sequence
  Category: MG91 effectors
  Description: MG91-320 effector
MGDKKYYLGLDMGTNSVGWAVTDEKYCLLKAKGKDLWGIREFDEASTAVDRRMHRVSRRRRQRQVVRIGLLKDYFSDQIEKVDPYFYQRLENSKYYLEDKDEQVKDKNALFNDPGFNDRDYFKNYPTIFHLRKELIENPAPHDVRLVFLALLNMFKHRGHFLNAGLDSEGDSLGNMSEIYREFAEITADDLDFPIETKGEKIEDILSSRDHSRSVKSEMLIELFGFDKKDKKRREFVRAICGLKTDTTKLFGDDQGFSSEEKTEFSFSDAAYDEKVPDIVSIIGEDRYYILELMKAIYDKGTLSEILKGSDYLSQARVASYNKHSDDLLRMKKVVRKYGSPEEYDFFFRSTEDGSYSSYVGTVNSGKKKRRSMKGDFISETNKYMTKLKKDHEDDQEIDTILNDIALENFMPKQLTSSNGIIPYQVHLKEMKKILGNAEGYLPFLIEKDESGLSVSERIIQLFSFQIPYYVGPITSKSQSDGGNGWVVRKDEGTVLPWNIHDKIDMEKTQEEFIKKLIRKCTYISGETVLPKCSLLYEKFSVLNEINNLRIDNERIDPELKQDIYNDLFLAGKAVTKKQLMKYLMNRGLITQADQVSGADITSESNARFNSALSSYGKFISIFGSDKMKEDQYQEMAEHIIYLVTIFGDSKSVLRDYLKREYGTVLNEEQIKKITGMKFRDWGRLSKAFLELHGCNKADGESKSIVRAMWDNNLNLMELINSDEYTYKDELFEKTNVQTKCLAEFKAEDLDEYYFSAPVKRMIWQTVLLIKEIEYIMGGAPDRVFIEMTRKPEDKPTRKDSRKKKFMDLYSNIKEEQKYWKDLIETSDSNGTIRSKKMFLYLTQMGRDMYTGKQIELDRLFDDNLYDIDHIYPRHFVKDDNLQNNLVLVDKRKNARKSDNYPLEKEISSNPEVVALWKTLHEKKLITDEKYRRLTGRTPFTDEQKAGFIARQLVETGQGTKGVADILKMLLPKDTTIVYAKASNASEFRHKFDLPKSRLVNDFHHANDAYLNIVVGNVYYTKFTQNPLNYIKNEYRKNSQNAEYNLDKMFDRDVIRGDQIAWKASKKDGEAGTITTVKKMMQKNTPLLTRYSFVAHGGITRKDTIWGKEVAKTEGYIPLKASDKKLKDVTKYGGFNNVSGAYFFLVEYEKKRKKERSLEVVPIYLVDRFENNVSELEKYCREELGLANASVRMSKIRIQSLISIDGYRLHISGKSENRILLRNACSMCLNTDWIKYIQKIEKYVETEVLDEEILNKQKNERLYNILKEKHLYQIYSYRPNSIGEKLEKAEVIFCGLDVKKQCSALYQLLQLTSIGPAIGDLTLLKESKNSGTMRMSKNISGNKDLYLINQSVTGVYENKIDLLTV

SEQ ID NO: 3129 - protein, 1359 aa, Unknown
  Description of Unknown: uncultivated organism sequence
  Category: MG91 effectors
  Description: MG91-321 effector
MRETGKDYYLGLDMGTNSVGWAVTDENYVLMRAKGKDLWGIREFDEALTAVDRRTHRVARRRRQRETARIGLLKEYFHDAIAEVDPDFYQRLDNSKYHEEDKDSAVKGKNGIFNDANYNDKDYFKQYPTIFHLRKELIESTEKHDVRLVYLALLNMFKHRGHFLNAGLSTESENTMDTAYHNFVETAAQTIECNFMETVDIEKIKEILGSRDYSRSKKAELVAQLLHVDSKNKVQMACIKCICGLKVTAAAIFGDKMAADEEKKTDICFSDFGYDEKVPVILEIVGEENFELVLAMQEIYDIGSLAGIMKDSLYLSMARVKEYEQHGKDLRILKGVVKKYGTKEEYDTLFRTMEEGTYSAYVNSVNTKKKSRRDVKKRTRDEFYGRLKKIISKMPQNDSDVLYIKDKMEKEAFLPKQLTASNGVIPNQIHAREMKKILQNAEIYLPFLKEKDTSGLTVSERILKLFSFQIPYYVGPVSEKSKLNGGNGWVVRKEEGTVLPWNIEEKIDMTATSREFVERMVRRCSYLSDERVLPKGSLLYERFCVLNEINAIKVDGVKIPVEIKQDLYSKYFKKGKKVTKKKIAEFLIARGVIKEDQTELISGIDIAVNSTLSTYAKFYAIFGEKMEQDSYKKMVEQIVEWCTIYGDAKKFLEQKIKECYGNILTQEEIKRITGFKFRDWGRLSKEFLELSGCSKATGEVMPLISMMWETNDNLMELLDDNYYTYREALEEKQNNAFKLLADIEPEDLDEMYFSAPVKRMVWQTLCIIKELEKVLGKAPKRLFVEMTRNEQKDKKRTDSRKQQFLDLYKNIKDESRDWKELITRADENGTLKSKKMYLYLTQRGRCMYTGHPIDLEDLFKDNRYDIDHIYPRHFVKDDNIMNNLVLVEKEKNAHKSDNYPLEEEIYKKQLPMWKDLHQCKLITDEKFKRLTGRNEFTDEQKAGFIARQLVETSQGTKGVTTILERALPDTKIVYAKASNVSEFRQKRDLLKSRVVNDFHHAQDAYLNIVVGNVYFVKFTQNPLHFIKAEYDKNKAQYEYNLSRMFDRDVRRGNETAWIGCKKGEEAGTILTVKKMMAKNTPMLTRLSFEGKGGLADQTLYSAEKAKGNGYIPLKTSDSKMQDVTKYGGFNSVSTAYFFLVEHELKGKKVRTLETVPIIWRDRIEKDETMLLKYCTDVLELKNPSIRVKKIKLQSYIKKDGYYMYITGKTNKQITTKNAVELCVNQRWIDYIKIIEKTVEKKKEECEEIDYDKNVEFYDLLLTKHTQEIFSNRPNPVGAKLKQGRDKFVSLTLLEQCRVLYEILQLSIIGNTRADLQLIGGAAISGVMLLSKNITDSKEFILINQSVTGLFEQKVDLLTV

SEQ ID NO: 3130 - protein, 1353 aa, Unknown
  Description of Unknown: uncultivated organism sequence
  Category: MG91 effectors
  Description: MG91-322 effector
MEKDYYLGLDMGTDSVGWAVTDENYNLIRAKGKDLWGVREFDSAKPAADRRSYRISRRRRQREQVRLGMLKSIFADAIKEKDPLFFIRLENSKYWKDDKNSKINTKNVLFDDPGYTDADYFKEFPTIFHLRLKLMNDDSGRYLSDPRFVYLACLQLFKHRGHFLSDISDETDPSDLSSTYERFKSLYCELTGYEFTEKDVAADDIMNVLSDRNLSRTAKKEKLIDVFSFSKSDSSKTECLKSICGLESDACKIFPDLKTEDIKKLSFNFSKSDYEEKSAELNESVGDEYFELISILKDIYDKGTLADILKGKKYLSEARVEDYNKHKKDLVLLKSVYRKYKTQDEYNEMFRDPTKGYGAYIGSNFTKDKKTSRRGSKSRDVFYDYLKKSLKGLEEDPDVKTIFDDIAKENFLVKQLTSSNGVIPNQVHLKELKKILSNAENYLPFLKETDESGLSASQRIISIFSFTIPYYVGPVSELSEKNGGNGWVVRKEDGKVYPWNFEDKINISETKRRFIDRLINECTYISGEKVLPKQSLIYQKFAMLNELNSVRINGERLDVEFKQKAFKELFSKGKQVTLNEFKNYLNNNGINIDEKSEISGVGKSSEMTRFNNKLSSYQVFHSVFGDKLEDKKYYDAAENIIYLGTIYADDKKTFKKAIEEKYGDFLTPDEIKRVSGLKFKDWGTLSAALFNLQGAEKSTGEVMTLIDALWNTQLNFMELINSDAFSYKEELEKYKKKGEGTIQNFKFEELNDYYFSAPVKRMIWQTVLIVREIEHVLGKPPVKMFVEVTRHDEEKEKIPPSRKDTFLSLYKNIKDESHDWKAIIEKADESGVIRSQKMYLYLSQMGRDLYTGKEIELDELFTTKYDIDHIIPQSLKKDDSILNNKVLTSKDFNNNIKQDNPLCEAIDDAHYAERKKLWDRLHNYNLINDEKYKRLTNRKGFSEEDLEGFIARQIVETSQAVLGVINIFKEIMPDTKIVFSKAKPISDFRKNEIGWLKSRTLNDYHHAHDAYLNIVVGNVYNTKFTDNPRNFIKKERQKDLNPNYHMNKVFWYNVERGGKVAWIAGEDGTKKTVLKTLAKNSELMTRQSFEQTGGLCNQQITNKDDAGSGIGYLPVKMGEDISKYGGYAKISQSYFFLVEHTFKKKRIRTIETVPAYLKSQIESDPDALKRYCAEKLGLVDPDIRLRRINYQSLAKYNGFYVTICSKTGDRFQVANAVRLTLSKEWNNYIKKLEKTEGDEEITEEKNIELYDILTDKHLNSIFLKRPNPVGENLKNGREKFVSLSKKEQVSTLNNILLFTGFASAGKADISSIGGSKNAGAMAVSKNVNNADEFILIENSVTGIYSVRKDLKTI

SEQ ID NO: 3131 - protein, 1358 aa, Unknown
  Description of Unknown: uncultivated organism sequence
  Category: MG91 effectors
  Description: MG91-323 effector
MEKEYYLGLDMGTNSVGWAVTDDAYNLIRFKGKDMWGIREFDEANPAVERRTHRTSRRREQRNAVRMGLIRSYFADEIQKVDSNFYQRLDNSFFHVEDKQDNVKDKNGIFNDKNYKDADYYKQYPTIFHLRKELIEDAFQKDVRLVYLAVANMFKHRGHFLLSGIGSESSKQTITDLYNQVSGLITEEYGISLKTDIAGTDFEQVLCSREYSRTRKLEKVCEILEIKNSDKLKKAFVKSMCGLSVKITDVIDDTFTEISDEDKKITFSFVDSDYDEKAGVLEEKLGTDVYDIISKLKEIHDKAQVAEIMKNYQYLSFARVADYEKHKKDLKILKRVVKKYFEPTVYDKLFRSGENGTYSAYVNSFNSGEKSRRNYKERKQEDLYNSIKKLLKSIDNVCDTDIEYIKNEIEKENFLPKQLTFKNGVIPNQIHASELKAILKNAEKYLPFLNEKDESGYTVSERILMLFSFQIPYYVGPVSPNSNGWVKRLEPGQVLPWNIDKKIDLKETSEQFIQRMVRNCTYIAGEKVLPKASLLYENFKVLNEINNLSINGERIAVALKQDLYNTLFLKGKRVTRKQIFNYFHSRGLVEEDSQISGIDIAVNNSLSTYGKFLPLFGEHLKEDKYKKMVDDIVFWCTVYGDSRKFLREQLEEKYSDVLDENQIKRITGMKFKDWGNLSKEFLELLGCCKSTGEMIPLIRAMWETNYNLMELLHSEEFTYSEELEEKQGKIEKVLSEYTIDDLNEEYFSAPVKRMVWQTLLIIKEIEKIMKCPPTRIFVEMTRKDDEKGDNGRKSSRKDQLLALYKKIQSEDKEWKKEMSSRIEDYDKNGALRSKKLYLYFIQKGLDMYTGKPIDLDNLMSANSNYDIDHIYPRHFVKDDNINNNLVLASKPANAEKSDIYPIKDSIYQKMKYTWKVLRDEGLITEEKYKRLTGRNPFTDEQKAGFIARQLVETGQGTKGVADLLTALLPDTKLVYSKAGNVSDFRKRYDIPKSRLINDFHHAHDAYLNIVVGNIYFTKFTSNPLNYIRKECSSKDNKYQYNLGNMYKWDVKRDGKTAWIAAKEGETGTLATVKKMLSRNTPILTRLAIEGHGGIADATLYSHKKAKQDAYIPLKSSDARMADVTKYGGYSSVTTAYLFLVEHEIKGKKIRTLETVPLYLKDRLENSKEKLEEYCRETLGYTNPSVRMKKIKLQSLIKLNGYYMQISGKTNKQFTVRNYVQFCLNSKWVDYIHKLEKYQDKGVIDDAITDEKNVELYNVLCEKHSVGIFTLRPNPVGDKIKKGYDKFVNLTTEEQIKLLIEIIKLTCVGIVSANLTLIGGASISGKMLISKNITDAKECLLINQSVTGLYENRIDLLRV

SEQ ID NO: 3132 - protein, 1358 aa, Unknown
  Description of Unknown: uncultivated organism sequence
  Category: MG91 effectors
  Description: MG91-324 effector
MEKEYYLGLDMGTNSVGWAVTDDAYNLIRFKGKDMWGIREFDEANPAVERRTHRTSRRREQRNAVRMGLIRSYFADEIQKVDSNFYQRLDNSFFHVEDKQDNVKDKNGIFNDKNYKDADYYKQYPTIFHLRKELIEDASQKDVRLVYLAVANMFKHRGHFLLSGIGSESSKQTITDLYNQVSGLITEEYGISLKTDIAGTDFEQVLCSREYSRTRKSEKVCEILEIKNSDKLKKAFVKSMCGLSVKITDIIDDTFTEISDEDKKITFSFVDSDYDEKAGVLEEKLGTDVYDIISKLKEIHDKAQVAEIMKNYQYLSFARVADYEKHKKDLKILKRVVKKYFEPTVYDKLFRSEENGTYSAYVNSFNSGEKSRRNYKVRKQEDLYNSIKKLLKSVDNVYDTDIEYIKNEMDKENFLPKQLTFKNGVIPNQIHASELKAILKNAEKYLPFLNEKDESGYTVSERILMLFSFQIPYYVGPVSPNSNGWVKRLEPGQVLPWNIDKKIDLKETSEQFIQRMVRNCTYIAGEKVLPKASLLYENFKVLNEINNLSINGERIAVALKQDLYNTLFLKGKRVTRKQIFNYFHSRGLVEEDSQISGIDIAVNNSLSTYGKFLPLFGEHLKEDKYKKMVDDIVFWCTVYGDSRKFLREQLEEKYSDVLDENQIKRITGMKFKDWGNLSKEFLELSGCCKSTGEMIPLIRAMWETNYNLMELLHSEEFTYSEELEEKQGKIEKVLSEYTIDDLNEEYFSAPVKRMVWQTLLIIKEIEKIMKCPPTRIFVEMTRKDDEKGDNGRKSSRKDQLLALYKRIQSEDKEWKKEMSSRIEDYDKNGALRSKKLYLYFIQKGLDMYTGKPIDLDNLMSANSNYDIDHIYPRHFVKDDNINNNLVLASKPANAEKSDIYPIKDSIYQKMKYTWKVLRDEGLITEEKYKRLTGRNPFTDEQKAGFIARQLVETGQGTKGVADLLTALLPDTKLVYSKAGNVSDFRKMYDIPKSRLINDFHHAHDAYLNIVVGNIYFTKFTSNPLNYIRKECSSKDNKYQYNLGNMYKWDVKRDGKTAWIAAKEGETGTIATVKKMLSRNTHTLTRLTIEGHGGIADATLYSHKKAKQDAYIPLKSSDARMADVTKYGGYSSVTTAYLFLVEHEIKGKKIRTLETVPLYLKDRLENSKEKLEEYCRETLGYTNPSVRMKKIKLQSLIKLNGYYMQISGRTGNRFTLRNYIQLCLNGKWVDYIHKLEKYQDKGFIDNVITDEKNVELYNVLCEKHNVGIYTMRPNPVGDRIKNGYDKFVDLTIEEQIKLLIEIIKLTCVGIVSADLTLIGGAAISGKMLMSKNITDANECILINQSVTGLYENRIDLLRV

SEQ ID NO: 3133 - protein, 1358 aa, Unknown
  Description of Unknown: uncultivated organism sequence
  Category: MG91 effectors
  Description: MG91-325 effector
MEKEYYLGLDMGTNSVGWAVTDDAYNLIRFKGKDMWGIREFDEANPAVERRTHRTSRRREQRNAVRMGLIRSYFADEIQKVDSNFYQRLDNSFFYVEDKQDNVKDKNGIFNDKNYKDANYYKQYPTIFHLRKELIEDASQKDVRLVYLAVANMFKHRGHFLLSGIGSESSKQTITDLYNQVSGLITEEYGISLKTDIAGTDFEQVLCSREYSRTRKSEKVCEILEIKNSDKLKKAFVKSMCGLSVKITDIIDDTFTEISDEDKKITFSFVDSDYDEKAGVLEEKLGTDVYDIISKLKEIHDKAQVAEIMKNYQYLSFARVADYEKHKKDLKILKRVVKKYFEPTVYDKLFRSEENGTYSAYVNSFNSEEKSRRNYKERKQEDLYNSIKKLLKSVDNVDDTDIEYIKNEMDKENFLPKQLTFKNGVIPNQIHASELKAILKNAEKYLPFLNEKDESGYTVSERILMLFSFQIPYYVGPVSSNSNGWGKRLEPGQGLPWNIDKKIDLKETSEQFIQRMVRNCTYIAGEKVLPKASLLYENFKVLNEINNLSINGERITVNLKQDLYNTLFLKGKRVTRKQIFNYFHSRGLVEEDSQISGIDIAVNNSLSTYGKFLPLFGEHLKEDKYKKMVDDIVFWCTVYGDSRKFLREQLEEKYSDVLDENQIKRITGMKFKDWGNLSKEFLELSGCCKSTGEVMPLIRAMWETNYNLMELLHSEEFTYSEELEEKQGKIEKVLSEYTIDDLNEEYFSAPVKRMVWQTLLIIKEIEKIMKCPPTRIFVEMTRKDDEKGDNGRKSSRKDQLLALYKKIQSEDKEWKKEMSSRIEDYDKNGALRSKKLYLYFIQKGLDMYTGKPIDLDNLMSANSNYDIDHIYPRHFVKDDNINNNLVLASKPANAEKSDIYPIKDSIYQKMKYTWKVLRDEGLITEEKYKRLTGRNPFTDEQKAGFIARQLVETGQGTKGVADLLTALLPDTKLVYSKAGNVSDFRKRYDIPKSRLINDFHHAHDAYLNIVVGNIYFTKFTSNPLNYIRKECSSKDNKYQYNLGNMYKWDVKRDGKTAWVAPEEGETGTLATVKKMLSRNTPILTRLTIEGHGGIADATLYSHKKAKQDTYIPLKSSDARMADVTKYGGYSSVTTAYLFLVEHEIKGKKIRTLETVPLYLKDRLENSKEKLEEYCRETLGYTNPSVRMKKIKLQSLIKLNGYYMQISGKTNKQFTVRNYVQFCLNSKWVDYIHKLEKYQDKGVIDDAITDEKNVELYNVLCEKHSVGIFTLRPNPVGDKIKKGYDKFVNLTTEEQIKLLIEIIKLTCVGIVSANLTLIGGASISGKMLISKNITDAKECLLINQSVTGLYENRIDLLRV

SEQ ID NO: 3134 - protein, 1358 aa, Unknown
  Description of Unknown: uncultivated organism sequence
  Category: MG91 effectors
  Description: MG91-326 effector
MEKEYYLGLDMGTNSVGWAVTDDAYNLIRFKGKDMWGIREFDEANPAVERRTHRTSRRREQRNAVRMGLIRSYFADEIQKVDSNFYQRLDNSFFHVEDKQDNVKDKNGIFNDKNYKDANYYKQYPTIFHLRKELIEDVSQKDVRLVYLAVANMFKHRGHFLLSGIGSESSKQTITDLYNQVSGLITEEYGISLKTDIAGTDFEQVLCSREYSRTRKSEKVCEILEIKNSDKLKKAFVKSMCGLSVKITDVIDDTFTEISDEDKKITFSFVDSDYDEKAGVLEEKLGTDVYDIISKLKEIHDKAQVAEIMKNYQYLSFARVADYEKHKKDLKILKRVVKKYFEPTVYDKLFRSGENGTYSAYVNSFNSGEKSRRNYKERKQEDLYNSIKKLLKSIDNVCDTDIEYIKNEIEKENFLPKQLTFKNGVIPNQIHVSELKAILKNAEKYLPFLNEKDESGYTVSERILMLFSFQIPYYVGPVSPNSNGWVKRLEPGQVLPWNIDKKIDLKETSEQFIQRMVRNCTYIAGEKVLPKASLLYENFKVLNEINNLSINGERITVNLKQDLYNTLFLKGKRVTRKQIFNYFHSRGLVEEDSQISGIDIAVNNSLSTYGKFLPLFGEHLKEDKYKKMVDDIVFWCTVYGDSRKFLREQLEEKYSDVLDENQIKRITGMKFKDWGNLSKEFLELSGCCKSTGEVMPLIRAMWETNYNLMELLHSEEFTYSEELEEKQGKIEKVLSEYTIDDLNEEYFSAPVKRMVWQTLLIIKEIEKIMKCPPTRIFVEMTRKDDEKGDNGRKSSRKDQLLALYKKIQSEDKEWKKEMSSRIEDYDKNGALRSKKLYLYFIQKGLDMYTGKPIDLDNLMSANSNYDIDHIYPRHFVKDDNINNNLVLASKPANAEKSDIYPIKDSIYQKMKYTWKVLRDEGLITEEKYKRLTGRNPFTDEQKAGFIARQLVETGQGTKGVADLLTALLPDTKLVYSKAGNVSDFRKRYDIPKSRLINDFHHAHDAYLNIVVGNIYFTKFTSNPLNYIRKECSSKDNKYQYNLGNMYKWDVKRDGKTAWIAAKEGETGTLATVKKMLSRNTPILTRLAIEGHGGIADATLYSHKKAKQDAYIPLKSSDARMADVTKYGGYSSVTTAYLFLVEHEIKGKKIRTLETVPLYLKDRLENSKEKLEEYCRETLGYTNPSVRMKKIKLQSLIKLNGYYMQISGKTNKQFTVRNYVQFCLNSKWVDYIHKLEKYQDKGVIDDAITDEKNVELYNVLCEKHSVGIFTLRPNPVGDKIKKGYDKFVNLTTEEQIKLLIEIIKLTCVGIVSANLTLIGGASISGKMLISKNITDAKECLLINQSVTGLYENRIDLLRV

SEQ ID NO: 3135 - protein, 1358 aa, Unknown
  Description of Unknown: uncultivated organism sequence
  Category: MG91 effectors
  Description: MG91-327 effector
MRETGKDYYLGLDMGTNSVGWAVTDENYVLMRAKGKDLWGIREFDEALTAVDRRTHRVARRRRQREIARIGLLKEYFHDAIAEVDPDFYQRLDNSKYHEEDKDSAVKGKNGIFNDANYNDKDYFKQYPTIFHLRKELIESTEKHDVRLVYLALLNMFKHRGHFLNAGLSTESENTMDTAYHNFVETAAQTIECNFMETVDIEKIKEILGSRDYSRSKKAELVAQILHVDSKNKVQMACIKCICGLKVTAAAIFGDKMAADEEKKTDICFSDFGYDEKVPVILEIVGEENFELVLAMQEIYDIGSLAGIMKDSLYLSMARVKEYEQHGKDLRILKGVVKKYGTKEEYDTLFRTMEEGTYSAYVNSVNTKKKSRRDVKKRTRDEFYGRLKKIISKMPQNDSDVLYIKDKMEKEAFLPKQLTASNGVIPNQIHAREMKKILQNAEIYLPFLKEKDTSGLTVSERILKLFSFQIPYYVGPVSEKSKLNGGNGWVVRKEEGTVLPWNIEEKIDMTATSREFVERMVRRCSYLSDERVLPKGSLLYERFCVLNEINAIKVDGVKIPVEIKQDLYSKYFKKGKKVTKKKNAEFLIARGVIKEDQTELISGIDIAVNSTLSTYAKFYAIFGEKMEQDSYKKMVEQIVEWCTIYGDAKKFLEQKIKECYGNVLTQEEIKRITGFKFRDWGRLSKEFLELSGCSKATGEVMPLISMMWETNDNLMELLDDNYYTYREALEEKQNNAFKLLADIEPEDLDEMYFSAPVKRMVWQTLCIIKELEKVLGKAPKRLFVEMTRNEQKDKKRTDSRKQQFLDLYKNIKDESRDWKELITRADENGTLKSKKMYLYLTQMGRCMYTGHPIDLEDLFKDNRYDIDHIYPRHFVKDDNIMNNLVLVEKEKNAHKSDNYPLEEEIYKKQLPMWKDLHQRKLITDEKFKRLTGRNEFTDEQKAGFIARQLVETSQGTKGVTTILERALPDTKIVYAKASNVSEFRQKRDLLKSRVVNDFHHAQDAYLNIVVGNVYFVKFTQNPLHFIKAEYDKNKAQYEYNLSRMFDRDVRRGNETAWIGCKKGEEAGTILTVKKMMAKNTPMLTRLSFEGKGGLADQTLYSAEKAKGNGYIPLKTSDSKMQDVTKYGGFNSVSTAYFFLVEHELKGKKVRTLETVPIIWRDRIEKDETMLLKYCTDVLELKNPSIRVKKIKLQSYIKKDGYYMYITGKTLNRIIIKNAVQMCLQQKWIVYIKNIEKAIQKKTIDATITYDANLELYNLIERKYKYEIFKNRPNPMGDKIEQGKKLFEEKSLLEQSKILYELLQLSAIGNVKADLQLIGGSASSGVMLIPKNITDSKEFILINQSVTGLFEQKVDLLTV

SEQ ID NO: 3136 - protein, 1342 aa, Unknown
  Description of Unknown: uncultivated organism sequence
  Category: MG91 effectors
  Description: MG91-328 effector
MRYFMGLDMGTSSVGWAVTDEHYQLLRRKGKDMWGIREFEEAATAVERRTHRVSRRRRQRQVARIGLLQEYFHDAIHQVDPNFYQRLKNSKYHEEDKDEIVRESNGIFNDAEYTDKEYFKEFPTIFHLRQELIKSKEPHDVRLVYLALVNMFKHRGHFLNATLSADGESRKIKDIYTDFVDKAAEQLGVSFATDIRYEELENYLSSNDLSRKRKGELIAELLHVTRKDKQQYALIECMLGLDKSVKLMFGDTLPEDFDKTIKVNFSDIAFEEKATEISEAIGEEKYDLILIMKEIYDAAILNRIMNGYTYLSDARVAEYEKHKSDLACLKHYIKEYGTQQQFDFLFRGTEKGSYSAYVHSVNSHEKQRRNMAGNKKEDLYSALKKMLKDMPENEEKTCIMMQIELDNFLPKQLTASNGVIPNQIHLKEMKKILANAENYLPFLKEKDESGYTISERIQKLFAFQIPYYIGPTTEKSAEFGGNGWVVRKEEGKVLPWNIDQKIDMKKTSEKFISRMVRRCTYMNDEQVLPKESLEYESFCVLNELNNIKVYGEKLPVDIKQDIYRTLCEKGKRVTKKSLMQYLVGRGVIKAEDEEQLTGLMDGLNNTLKSFAKFKAIFGDAIYEDSCKKMVEQIIFWCTVYGDSKHFLKEQLLEKYGEVLTDAQIKRILGIKFRDWGNLSKKFLELQGCSKETGKVNSLIRMLWETNDNLMELLAQDSYTFKEELENMQESTYKVLTELQPEDLDHMYFSAPVKRMIWQTILIIKEVTKVMGCQPERLFIEMTREHGQKNDIKDSRAKKFYELYSKIKDEDKDWRKVIEDADKDGRIRSKKMYLYLTQMGRCMYTGRPIDLDQLFNNNLYDIDHIYPRHYVKDDNLENNMVLVEKQSNAHKSDVYPLESGIYEKQVNWWRELHRKNLINDEKLKRLTGRNPFTDEQKAGFIARQLVETSQGTKGVATILQEALPDTTLVYAKARNVSEFRSDNDLLKSRIVNDFHHAHDAYLNIVIGNVYYVKFTKNPINFIREHGTYNLGKMFAKDVKRGDDIGWVAQSGNGQTATMETIKRTMARNTPLLTRMSYEVTGGLANQTLYSASKAKEGTYIPLKSSDERMQDVTKYGGFTSVSTAYFMLVEHDGKKGKRIRTIESVPIMWKERIEKNPAELERYCLEVLKLSNPDIRVRKILIQSLIKRNGYYMQITGKTGNQLYVRNTVSLCLKQEWVNYIKKLEKGNDENITKDKNLVLYDILVDKHNNTIYSQRPNPVGEKLVKRREEFINLNLNDQVTVLLEILKLTQIALGGANLKLIGEAEKTGVMLISKDITTLDEMLLINQSVTGLYEQKVNLLTV

SEQ ID NO: 3137 - protein, 531 aa, Unknown
  Description of Unknown: uncultivated organism sequence
  Category: MG91 effectors
  Description: MG91-329 effector
MNEVFVLELPLRVEKYQADILNKRYEQLRQLYNYVQGKLRRQYSYFEQMKEFKACKTFKEKRDFFRSHPFYINETLKNNKTPFKVSFDEYGIKGYVEKLAQKLVGGNKSYADFGFTTLILDHLGASIWSAWNKKLYDLKAKHISYKKYDELNSFSSRRQVVHGVVYFSGIELHLDTMELSIKMNGKQGNNAKFITLKIQHNPKHADYELRALKGGLESVKVVKVVRRMVRSQYKYYVQLTIEGEKPQKGRTLGNGRVGIDLGPTTVAVSGENIVSIDKLASKCDNIQEEITRLSRKIDRSRRANNPQNFNEDGTIKRGVKLVWKKEKNLKRYSKLKRELAELRRKQAAIRKQQHIERANALLKEGDTFIVENNPVNAWVRRAKETKIDEKTGKYKSKRGSGRSVGNHAPAMFVDILENKVKSLGGRFERVNTQNAASQYDFTTDSFKTGDEKHKLNERAITLSNGDTHQRDMLAAFNLQHLKLDETKTKQYDTEAMAADYDRFCKLEREEIQRYKNKEKKDDRSTIGAEKL

SEQ ID NO: 3138 - protein, 1352 aa, Unknown
  Description of Unknown: uncultivated organism sequence
  Category: MG91 effectors
  Description: MG91-330 effector
MTAFKYYLGLDMGTNSMGWAATDPEYRLLKAKGKDLWGIREFNEASGAVERRTHRISRRRRQREQVRIGILKDYFHDAICEVDPGFFRRLENSKYHEEDKDVEVRYKNNIFNDSNYTDKDYFNEYPTIYHLRNELISSTEKHDVRLVFLALLNMFKHRGHFLNAGLGENNGESNIDNAYFELTELLSELTEYHLSQDIDCKQIEAILSRRDMSRTHKAEELAGVLHVDLKNKPYKELIRGLCGLKFNACVVFPDVQSEEVTKLDICLSESTFDEKSDEIANIIGEDYFEIIMAMKEMFDIGSLASIMKGHNYLSQARVASYTKHKEDLKLLKEVIKKYCGKKEYDKFFNSDADGSYASYVGSYNSKNKERRVGNKRTSEELYKEIKKLLKDAQKEDENVQKILTSIENETFLPKQLTASNGVIPNQVHAREMKKILSNAENYLPFLTEKDETGLSVSERILKLFTFQIPYYVGPTSENSGKNGGNGWVVRREDGQVLPWNIDEKIDMKATSEAFISRMVRRCTYISGEQVLPKASLEYQSYCVLNEINNIKIDGERISVELKQDIYKAVFQKGKKVTKKQLCKYLHTRGIIETEEQVTGVDVSINNALTTYGKFKPIFGEDISKDSVQKMIEDIVFWCTVYGDSKKFLKDRIEEKYGNKLSEEQIKRILGFKFKDWGNLSKKFLELNGADTSTGESISIIRALWNNNLNLMELINSSLYNYKECLAEYQNTMLKTLSEIEAEDLNEYYFSAPVRRMIWQTILVIKELVKVLGCEPERIFVEMTRKPDEHKTRTSSRRNKFEELYKKVKDETTDWMQVIANAEEDGKIRSKKMYLYLTQKGRCMYTGKHIELDDLFDNNLYDIDHIYPRHFVKDDNIDNNLVLVCKEKNAHKSDHYPIEEEIFLSQKKMWLELRKSGFITEEKYNRLMGRNPFSDEQKAGFIARQLVETSQGTKGVANILRQLLPGSKIVYAKASNVSEFRRTRDDIPKSRLVNDFHHAHDAYLNIVVGNVYYVKFTQNPLNFIKKDYDNYKEDYNLSKMFDWDVKRNGEVAWIAQRKDGEAGTITTVKKMLSRNTPLMTRYSFEGKGGLANETLYSAKKAKGEGYIPFKSSDDKMQDVTKYGGFTSVTGAYFFLVEHAEKKKRIRTIESVPVYLAQKIEQNPDELKKYCEEILGLIDADIRLKKIKIGSLIKRNGYFCYITGKTGKQLIVRNAVNLCLKNEWIKYISKLEKVKEKDAVDKIITKEKNEVLYSELIQKFKHGIFSKRPNPVGDKLEKGSEKFSNLSIKEQCTVLCQILQLAAVLGSECDMTLLGESAHCGKMLISKKIGDEEIYLINQSVTGLYEKKINLHTV

SEQ ID NO: 3139 - protein, 1358 aa, Unknown
  Description of Unknown: uncultivated organism sequence
  Category: MG91 effectors
  Description: MG91-331 effector
MEKEYYLGLDMGTNSVGWAVTDDAYNLIRFKGKDMWGIREFDEANPAVERRTHRTSRRREQRNAVRMGLIRSYFADEIQKVDSNFYQRLDNSFFHVEDKQDNVKDKNGIFNDKNYKDADYYKQYPTIFHLRKELIEDASQKDVRLVYLAVANMFKHRGHFLLSGIGSESSKQTITDLYNQVSGLITEEYGISLKTDIAGTDFEQVLCSREYSRTRKSEKVCEILEIKNSDKLKKAFVKSMCGLSVKITDVIDDTFTEISDEDKKITFSFVDSDYDEKAGVLEEKLGTDVYDIISKLKEIHDKAQVAEIMKNYQYLSFARVADYEKHKKDLKILKRVVKKYFEPTVYDKLFRSGENGTYSAYVNSFNSGEKSRRNYKERKQEDLYNSIKKLLKSIDNVCDTDIEYIKNEIEKENFLPKQLTFKNGVIPNQIHVSELKAILKNAEKYLPFLNEKDESGYTVSERILMLFSFQIPYYVGPVSPNSNGWVKRLEPGQVLPWNIDKKIDLKETSEQFIQRMVRNCTYIAGEKVLPKASLLYENFKVLNEINNLSINGERIAVALKQDLYNTLFLKGKRVTRKQIFNYFHSRGLVEEDSQISGIDIAVNNSLSTYGKFLPLFGEHLKEDKYKKMVDDIVFWCTVYGDSRKFLREQLEEKYSDVLDENQIKRITGMKFKDWGNLSKEFLELLGCCKSTGEMIPLIRAMWEINYNLMELLHSEEFTYSEELEEKQGKIEKVLSEYTIDDLNEEYFSAPVKRMVWQTLLIIKEIEKIMKCPPTRIFVEMTRKDDEKGDNGRKSSRKDQLLALYKKIQSEDKEWKKEMSLRIEDYDKNGALRSKKLYLYFIQKGLDMYTGKPIDLDNLMSANSNYDIDHIYPRHFVKDDNINNNLVLASKPANAEKSDIYPIKDSIYQKMKYTWKVLRDEGLITEEKYKRLTGRNPFTDEQKAGFIARQLVETGQGTKGVADLLTALLPDTKLVYSKAGNVSDFRKRYDIPKSRLINDFHHAHDAYLNIVVGNIYFTKFTSNPLNYIRKECSSKDNKYQYNLGNMYKWDVKRDGKTAWIAAKEGETGTIATVKKILSRNTPTLTRLTIEGHGGIADATLYSHKKAKQDAYIPLKSSDARMADVTKYGGYSSVTTAYLFLVEHEIKGKKIRTLETVPLYLKDRLENSKEKLEEYCRESLGYTNPSVRMKKIKLQSLIKLNGYYMQISGKSIKQFEVRNYVQICLNGKWVDYIHKLEKYQDKGVIDNAITDEKNVELYNILCEKHSVGIFTLRPNPVGDKIKKGYDKFVNLTTEEQIKLLIEIIKLTCVGIVKADLRLIGASEKSGTMKINKNITDAKECFLINQSVTGLYENRIDLLRV

SEQ ID NO: 3140 - protein, 1352 aa, Unknown
  Description of Unknown: uncultivated organism sequence
  Category: MG91 effectors
  Description: MG91-332 effector
MTAFKYYLGLDMGTNSVGWAATDPEYRLLKAKGKDLWGIREFNEASGAVERRTHRISRRRKQREQVRIGILKDYFHDAICEVDPSFFQRLENSKYHEEDKDVEVRYKNNIFNDSNYTDKDYFNEYPTIYHLRNELISSTEKHDVRLVFLALLNMFKHRGHFLNAGLGENNGESNIDNAYFELTELLSELTEYHLSQDIDCKQIEAILSRRDMSRTHKAEELAGVLHVDLKNKPYKELIRGLCGLKFNACVVFPDVQSEEVTKLDICLSESTFDEKSDEIANIIGEDYFEIIMAMKEMFDIGSLASIMKGHNYLSQARVASYTKHKEDLKLLKEVIKKYCGKKEYDKFFNSDADGSYASYVGSYNSKNKERRVGNKRTSEELYKEIKKLLKDAQKEDENVQKILTSIENETFLPKQLTASNGVIPNQVHAREMKKILSNAENYLPFLTEKDETGLSVSERILKLFTFQIPYYVGPTSENSGKNGGNGWVVRREDGQVLPWNIDEKIDMKATSEAFISRMVRRCTYISGEQVLPKASLEYQSYCVLNEINNIKIDGERISVELKQDIYKAVFQKGKKVTKKQLCKYLHTRGIIETEEQVTGVDVSINNALTTYGKFKPIFGEDISKDSVQKMIEDIVFWCTVYGDSKKFLKDRIEEKYGNKLSEEQIKRILGFKFKDWGNLSKKFLELNGADTSTGESISIIRALWNNNLNLMELINSSLYNYKECLAEYQNTMLKTLSEIEAEDLNEYYFSAPVRRMIWQTILVIKELVKVLGCEPERIFVEMTRRPDEHKTRTSSRRNKFEELYKKVKDETTDWMQVIANAEEDGKIRSKKMYLYLTQKGRCMYTGKHIELDDLFDNNLYDIDHIYPRHFVKDDNIDNNLVLVCKEKNAHKSDHYPIEEEIFLSQKKMWLELRKSGFITEEKYNRLMDRNPFSDEQKAGFIARQLVETSQGTKGVANILRQLLPGSKIVYAKASNVSEFRCTRDDIPKSRLVNDFHHAHDAYLNIVVGNVYYVKFTQNPLNFIKKDYDKYKEDYNLSKMFDWDVKRNGEVAWIAQRKDGAAGTITTVKRMLSRNTPLMTRYSFDGKGGLTNETLYSAKKAKGEGYIPFKSSDDKMQDVTKYGGFTSVTGAYFFLVEHTEKKKRIRTIESVPVYLAQKIEQNPDELKKYCEEILGLIDADIRLKKIKIGSLIKRNGYFCYITGKTGNRLIVRNAVNLCLKNEWIKYISKLEKVKEKDAVDKIITKEKNEVLYSELIQKFKHGIFSKRPNPVGDKLEKDSEKFNNLSIKDQCAVLCQVLRMAAILGSECDMTLLGDSPNCGKMLISKKIGDEEIYLINQSVTGLYEKKINLHTV

SEQ ID NO: 3141 - protein, 1359 aa, Unknown
  Description of Unknown: uncultivated organism sequence
  Category: MG91 effectors
  Description: MG91-333 effector
MLEKPYYLGLDMGTNSVGWAVTDQQYNLLKAKGKDLWGIREFAEADTSVERRTHRISRRRRQREQARIGLLNDYFHDAIIAIDPSFFQRLENSKYHLEDKDQNVRYKYNIFNDPDYTDADYYTQYPTIYHLRKELLENPKPHDVRLVYLALLNMFKHRGHFLNSGISDGNNERSLKDAYINFAISVSELTEDYFNQDVDYSTIEGILSSRDLNRTKKAEELSTVLGIDFKNKKYKEYLRAICGLKINAYTLFSDQLLDDTTKIDLCVSDASFDEKSEELVSLIGEDLFQIILNIKEIYDIGSLAGILKGYTYLSQARVAAYDKHKHDLKLLKSSIKKYCTKEEYNNFFNSDADGSYASYIGSFNSGNKERRVGSKRTSEDLYKEIKKLLKGANKSDPAINEIFTSIETESFLPKQLTASNGIIPNQVHSKEMARILTNAENYLPFLKETDENNLSISNRILQLYKFQIPYYIGPVTEKSQRDGGNGWVIRKDNGRVFPWNIEEKIDVKATSEAFISRMVRRCTYMNGKQVLPKASLEYESFRVLNEINNLRIDGERIPVTLKQDIYTDLFQKGKKVTKKQLCNYLATRGLIESSEQVTGIDIAINNSLSTYGKFKAIFGEDIKLDHIQHMIEDIVFWCTVYGDSKQFLKEQIEDKYKGKLSPEQMKRILGFKFKDWGNLSKEFFELKGADKSTGEAVSIIRALWENNLNLMELINSPEFDFKEQLADYEANSLKTLSDFEPEDLNDYYFSAPVRRMIWQTTLIIKELVHVLGKEPARIFIEMTREKDASRGRTLSRKKKFEDLYKNVKDENTDWAKVIEHADESGTIRSKKMYLYLTQKGRCMYTGNHIELSDLFNDNLYDIDHIYPRHFVKDDNIDNNLVLVTKEKNAHKSDNYPLEAEIFNKQRNMWTQLRKEGFISEEKYNRLMGRNAFTDEQKAGFIARQLVETSQGTKGVAELFHQLLPNSKIVCAKAGNVSDFRRNRELPKSRLVNDFHHAHDAYLNIVVGNVYYVKFTQNPINYIKNSYNKDMNKNNYNLSRMFDWDVKRGDEVAWIAQKQDGATGTISTVKKMLSKNTPLMTRLSYEGKGALANETLYSAEKAKGEGYIPFKSSDTKIQDVTKYGGFTSVTGAYFFLVEHDEKKKRIRTIESVPLYLADKIDKDSSELERYCDKLGLVNYDIRVRKIKIGSLLNRNGYFAYLTGKTGKQLILRNATNLCLDKKWTRYIKKIEKYKETNVLDSIITSETMVNLYNELLNKFTVGIYGRRPNPIGEKMDSAKNTFTSYTLDNQCNLIYQILQLSKILGFETDLSLLRTNKQSGKPTREGGMQISKKIDNTTSMYLINQSPTGLFETKIDLQTI

SEQ ID NO: 3142 - protein, 1352 aa, Unknown
  Description of Unknown: uncultivated organism sequence
  Category: MG91 effectors
  Description: MG91-334 effector
MTAFKYYLGLDMGTNSVGWAATDPEYRLLKAKGKDLWGIREFNEASGAVERRTHRISRRRRQREQVRIGILKDYFHDAICEVDPSFFRRLENSKYHEEDKDVEVRYKNNIFNDGNYTDKDYFNEYPTIYHLRNELISSTEKHDVRLVFLALLNMFKHRGHFLNAGLGENNGESNIDNAYFELTELLSELTEYHLSQDIDCKQIEAILSRRDMSRTHKAEELAGVLHVDLKNKPYKELIRGLCGLKFNACVVFPDVQSEEVTKLDICLSESSFDEKSDEIANIIGEDYFEIIMAMKEMFDIGSLASIMKGHNYLSQARVASYTKHKEDLKLLKEVIKKYCGKKEYDKFFNSDADGSYASYVGSYNSKNKERRVGNKRTSEELYKEIKKLLKDAPKEDENVQKILTSIENETFLPKQLTASNGVIPNQVHAREMKKILSNAENYLPFLTEKDETGLSVSERILKLFTFQIPYYVGPTSENSGKNGGNGWVVRREDGQVLPWNIDEKIDMKATSEAFISRMVRRCTYISGEQVLPKASLEYQSYCVLNEINNIKIDGERISVELKQDIYKAVFQKGKKVTKKQLCKYLHTRGIIETEEQVTGVDVSINNALTTYGKFKPIFGEDISKDSVQKMIEDIVFWCTVYGDSKKFLKDRIEEKYGNKLSEEQIKRILGFKFKDWGNLSKKFLELNGADTSTGESISIIRALWNNNLNLMELINSSLYNYKECLAEYQNTMLKTLSEIEAEDLNEYYFSAPVRRIIWQTILVIKELVKVLGCEPERIFVEMTRKPDEHKTRTSSRRNKFEELYKKVKDEATDWMQVIAKAEEDGKIRSKKMYLYLTQKGRCMYTGKHIELDDLFDKNLYDIDHIYPRHFVKDDNIDNNLVLVCKEKNAHKSDHYPIEEETFLSQKKMWLELRKSGFITEEKYNRLMGRSPFSDEQKAGFIARQLVETSQGTKGVANILRQLLPGSKIVYAKASNVSEFRHTRDDIPKSRLVNDFHHAHDAYLNIVVGNVYYVKFTQNPLNFIKKDYDKYKEDYNLSKMFDWDVKRNGEVAWIAQRKDGEAGTITTVKRMLSRNTPLMTRYSFEGKGGLANETLCSAKKAKGEGYIPFKSSDDKMQDVTKYGGFTKVTGAYFFLVEHTEKKKRIRTIESVPVYLAQKIEQNPDELKKYCEEILGLVDADIRLKKIKIGSLIKRNGYFCYITGKTGNRLSVRNAVNLCLKNEWIKYISKLEKVKEKDAVDEIITKEKNEVLYSELIQKFKHGIFSKRPNPVEDKLEKGSEKFSNLSIKEQCAVLCQILQLAAVLGSECDMTLLGESAHCGKMLISKKIGDEEIYLLNQSVTGLYEKKINLHTV

SEQ ID NO: 3143 - protein, 1352 aa, Unknown
  Description of Unknown: uncultivated organism sequence
  Category: MG91 effectors
  Description: MG91-335 effector
MLEKPYYLGLDMGTNSVGWAVTDQHYNLLKAKGKDLWGIREFTEADTSVERRTHRISRRRRQREQARIGLLNDYFHDTIIAIDPSFFQRLENSKYHLEDKDQNVRYKYNIFNDPDYTDVDYYTQYPTIYHLRKELLENPKPHDVRLVYLALLNMFKRRGHFLNAGISDGNNERSLKDAYINFAISVSELTEDYFNQDVDYSAIEEILSSRDLNRTKKAEELSTVLGIDFKNKKYKEYLRAICGLKINAYTLFSDQLPDDTTKIDLCVSDASFDEKSEELVSLIGEDLFQIILNIKEIYDIGSLTGILKGYTYLSQARVAAYNKHKHDLKLLKSSIKKYCTKEEYNNFFNSDADGSYASYIGSFNSGSKERRVGSKRTSEDLYKEIKKLLKDANKSDPAINEIFTSIETESFLPKQLTASNGIIPNQVHSKEMAKILSNAENYLPFLKDTDENNLSISNRILQLYKFQIPYYIGPVTEKSQRDGGNGWVIRKDNGRVLPWNIEEKIDVKATSEAFISRMVRRCTYMNGKQVLPKASLEYESFRVLNEINNLRIDGERIPVALKQDIYTDLFQKGKKVTKKQLCNYLVTRGLIESSEQVTGIDIAINNSLSTYGKFKAILGEDIKLDHIQHMIEDIVFWCTVYGDSKQFLKEQIEDKYKEKLSPEQMKRILGFKFKDWGNLSKEFFELKGADKSTGEAISIIRALWDNNLNLMELINSPEFDFKERLTDYQTNSLKTLSDFEPEDLNEYYFSAPVRRMIWQTTLIIKELVHVLGKEPDRIFIEMTREKDASRGRTLSRKKKFEDLYKNVKDENTDWAKVIEHANESGTIRSKKMYLYLTQKGRCMYTGKHIELSDLFNDNLYDIDHIYPRHFVKDDNIDNNLVLVTKEKNAHKSDNYPLEAEIFNKQRNMWTQLRKEGFISEEKYNRLMGRNAFTDEQKAGFIARQLVETSQGTKGVAELFHQLLPNSKIVYAKAGNVSDFRRNRELPKSRLVNDFHHAHDAYLNIVVGNVYYVKFTQNPINYIKNSYNKDMNKNNYNLSRMFDWDVKRGDEVAWIAQKKDGAAGTISTVKKMLSRNTPLMTRLSYEGKGALANETLYSAEKAKGEGYIPFKSSDAKIQDVTKYGGFTSVTGAYFFLVEHDEKKKRIRTIESVPLYLANKIEKDSSELERYCDKLGLINYDIRVRKIKIGSLLNRNGYFAYLTGKTGKQLILRNATNLCLDKKWTIYIKKIEKYKEANVLDSIITSEENIKLYNELLNKFTVGIYGRRPNPIGEKMDSARDKFASLSIENQCLALYQILQLSAILGNESDLQLIGASTHAGKMLISKKIGTDEIYLINQSPTGLFETKIDLQTI

SEQ ID NO: 3144 - protein, 1331 aa, Unknown
  Description of Unknown: uncultivated organism sequence
  Category: MG91 effectors
  Description: MG91-336 effector
MRYFMGLDMGTSSVGWAVTDEHYQLLRRKGKDMWGIREFEEAATAVERRTHRVSRRRRQRQVARIGLLQEYFHDAIHQVDPNFYQRLKNSKYHEEDKDEIVRESNGIFNDAEYTDKEYFKEFPTIFHLRQELIKSKEPHDVRLVYLALLNMFKHRGHFLNATLSADGESRKIKDIYTDFVDKAAEQLGVSFATDIRYEELENYLSSNDLSRKRKGELIAELLHVTRKDKQQYALIECMLGLDKSVKLMFGDTLPEDFDKTIKVNFSDIAFEEKATEISEAIGEEKYDLILIMKEIYDAAILNRIMNGYTYLSDARVAEYEKHKSDLACLKHYIKEYGTQQQFDFLFRGTEKGSYSAYVHSVNSHEKQRRNMAGNKKEDLYSALKKMLKDMPENEEKTCIMMQIELDNFLPKQLTASNGVIPNQIHLKEMKKILANAENYLPFLKEKDESGYTVSERIQKLFAFQIPYYIGPTTEKSAEFGGNGWVVRKEEGKVLPWNIDQKIDMKKTSEKFISRMVRRCTYMNDEQVLPKESLEYESFCVLNELNNIKVYGEKLPVDIKQDIYRTLCEKGKRVTKKSLMQYLVGRGVIKAEDEEQLTGLMDGLNNTLKSFAKFKAIFGDAIYEDSCKKMVEQIIFWCTVYGDSKHFLKEQLLEKYGEVLTGAQIKRILGIKFRDWGNLSKKFLELQGCSKETGEVNSLIRMLWETNDNLMELLAQDSYTFKEELENMQESTYKVLTELQPEDLDHMYFSAPVKRMIWQTILIIKEVTKVMGCQPERLFIEMTREHGQKNDIKDSRAKKFYELYSKIKDEDKDWRKVIEDADKDGRIRSKKMYLYLTQMGRCMYTGRPIDLDQLFNNNLYDIDHIYPRHYVKDDNLENNMVLVEKQSNAHKSDVYPLESGIYEKQVNWWRELHRKNLINDEKLKRLTGRNPFTDEQKAGFIARQLVETSQGTKGVATILQEALPDTTLVYAKARNVSEFRSDNDLLKSRIVNDFHHAHDAYLNIVIGNVYYVKFTKNPINFIREHGTYNLGKMFAKDVKRGDDIGWVAQSGNGQTATMETIKRTMARNTPLLTRMSYEVTGGLANQTLYSASKAKEGTYIPLKSSDERMQDVTKYGGFTSVSTAYFMLVEHDGKKGKRIRTIESVPIMWKERIEKNPAELERYCLDVLKLSNPDIRVRKILIQSLIKRNGYYMQITGKTGNRMYVRNMVSLCLVQDWVNYIKKLEKDKDENISKEKNINTIYNTRPNPVGDLLIKRRSDFIELKITDQVIILLEILKLTQTALGSANLKLIGEAEKTGVMLISKDITALDEMLLINQSVTGLYEQRVNLLTV

SEQ ID NO: 3145 - protein, 1358 aa, Unknown
  Description of Unknown: uncultivated organism sequence
  Category: MG91 effectors
  Description: MG91-337 effector
MEKEYYLGLDMGTNSVGWAVTDDAYNLIRFKGKDMWGIREFDEANPAVERRTHRTSRRREQRNAVRMGLIRSYFADEIQKVDSNFYQRLDNSFFHVEDKQDNVKDKNGIFNDKNYKDADYYKQYPTIFHLRKELIEDASQKDVRLVYLAVANMFKHRGHFLLSGIGSESSKQTITDLYNQVSGLITEEYGISLKTDIAGTDFEQVLCSREYSRTRKSEKVCEILEIKNSDKLKKAFVKSMCGLSVKITDVIDDTFTEISDEDKKITFSFVDSDYDEKAGVLEEKLGTDVYDIISKLKEIHDKAQVAEIMKNYQYLSFARVADYEKHKKDLKILKRVVKKYFEPTVYDKLFRSGENGTYSAYVNSFNSGEKSRRNYKERKQEDLYNSIKKLLKSIDNVCDTDIEYIKNEIEKENFLPKQLTFKNGVIPNQIHASELKAILKNAEKYLPFLNEKDESGYTVSERILMLFSFQIPYYVGPVSSNSNGWVKRLEPGQVLPWNIDKKIDLKETSEQFIQRMVRNCTYIAGEKVLPKASLLYENFKVLNEINNLSINGERIAVALKQDLYNTLFLKGKRVTRKQIFNYFHSRGLVEEDSQISGIDIAVNNSLSTYGKFLPLFGEHLKEDKYKKMVDDIVFWCTVYGDSRKFLREQLEEKYSDVLDENQIKRITGMKFKDWGNLSKEFLELLGCCKSTGEMIPLIRAMWETNYNLMELLHSEEFTYSEELEEKQGKIEKVLSEYTIDDLNEEYFSAPVKRMVWQTLLIIKEIEKIMKCPPTRIFVEMTRKDDEKGDNGRKSSRKDQLLALYKKIQSEDKEWKKEMSSRIEDYDKNGALRSKKLYLYFIQKGLDMYTGKPIDLDNLMSANSNYDIDHIYPRHFVKDDNINNNLVLASKPANAEKSDIYPIKDSIYQKMKYTWKVLRDEGLITEEKYKRLTGRNPFTDEQKAGFIARQLVETGQGTKGVADLLTALLPDTKLVYSKAGNVSDFRKRYDIHKSRLINDFHHAHDAYLNIVVGNIYFTKFTSNPLNYIRKECSSKDNKYQYNLGNMYKWDVKRDGKTAWIAAKEGETGTIATVKKILSRNTPTLTRLTIEGHGGIADATLYSHKKAKQDAYIPLKSSDARMADVTKYGGYSSVTTAYLFLVEHEIKGKKIRTLETVPLYLKDRLENSKEKLEEYCRESLGYTNPSVRMKKIKLQSLIKLNGYYMQISGKSIKQFEVRNYVQICLNGKWVDYIHKLEKYQDKGVIDNAITDEKNVELYNILCEKHSVGIFTLRPNPVGDKIKKGYDKFVNLTTEEQIKLLIEIIKLTCVGIVKADLRLIGASEKSGTMKINKNITDAKECFLINQSVTGLYENRIDLLRV

SEQ ID NO: 3146 - protein, 1358 aa, Unknown
  Description of Unknown: uncultivated organism sequence
  Category: MG91 effectors
  Description: MG91-338 effector
MEKEYYLGLDMGTNSVGWAVTDDAYNLIRFKGKDMWGIREFDEANPAVERRTHRTSRRRKQRNAVRMGLIRSYFADEIQKVDSNFYQRLDNSFFHVEDKQDNVKDKNGIFNDKNYKDADYYKQYPTIFHLRKELIEDASQKDVRLVYLAVANMFKHRGHFLLSGIGSESSKQTITDLYNQVSGLITEEYGISLKTDIAGTDFEQVLCSREYSRTRKSEKVCEILEIKNSDKLKKAFVKSMCGLSVKITDIIDDTFTEISDEDKKITFSFVDSDYDEKAGVLEEKLGTDVYDIISKLKEIHDKAQVAEIMKNYQYLSFARVADYEKHKKDLKILKRVVKKYFEPTVYDKLFRSEENGTYSAYVNSFNSEEKSRRNYKERKQEDLYNSIKKLLKSVDNVDDTDIEYIKNEMDKENFLPKQLTFKNGVIPNQIHASELKAILKNAEKYLPFLNEKDESGYTVSERILMLFSFQIPYYVGPVSSNSNGWVKRLEPGQVLPWNIDKKIDLKETSEQFIQRMVRNCTYIAGEKVLPKASLLYENFKVLNEINNLSINGERITVNLKQDLYNTLFLKGKRVTRKQIFNYFHSRGLVEEDSQISGIDIAVNNSLSTYGKFLPLFGEHLKEDKYKKMVDDIVFWCTVYGDSRKFLREQLEEKYSDVLDENQIKRITGMKFKDWGNLSKEFLELSGCCKSTGEVMPLIRAMWETNYNLMELLHGEEFTYSEELEEKQGKIEKVLSEYTIDDLNEEYFSAPVKRMVWQTLLIIKEIEKIMKCPPTRIFVEMTRKDDEKGDNGRKSSRKDQLLALYKKIQSEDKEWKKEMSSRIEDYDKNGALRSKKLYLYFIQKGLDMYTGKPIDLDNLMSANSNYDIDHIYPRHFVKDDNINNNLVLASKPANAEKSDIYPIKDSIYQKMKYTWKVLRDEGLITEEKYKRLTGRNPFTDEQKAGFIARQLVETGQGTKGVADLLTALLPDTKLVYSKAGNVSDFRKRYDIPKSRLINDFHHAHDAYLNIVVGNIYFTKFTSNPLNYIRKECSSKDNKYQYNLGNMYKWDVKRDGKTAWVAPEEGETGTLATVKKMLSRNTPILTRLTIEGHGGIADATLYSHKKAKQDTYIPLKSSDARMADVTKYGGYSSVTTAYLFLVEHEIKGKKIRTLETVPIYLKDRLENSKEKLEEYCRETLGYTNPSVRMKKIKLQSLIKLNGYYMQISGRTGNRFTLRNYVQLCLNGKWVDYIHKLEKYQDKGVIDDLITDERNVELYNVLCEKHSVGIFTLRPNLVGDKIKNGYDKFVNLTTEEQIKLLIEIIKLTCVGIVSANLTLIGGAAISGKMLMSKNITYANECILINQSVTGLYENRIDLLRV

SEQ ID NO: 3147 - protein, 1352 aa, Unknown
  Description of Unknown: uncultivated organism sequence
  Category: MG91 effectors
  Description: MG91-339 effector
MTAFKYYLGLDMGTNSVGWAATDPEYRLLKAKGKDLWGIREFNEASGAVERRTHRISRRRKQREQVRIGILKDYFHDAICEVDPSFFQRLENSKYHEEDKDVEVRYKNNIFNDGNYTDKDYFNEYPTIYHLRNELISSTEKHDVRLVFLALLNMFKHRGHFLNAGLGENNGESNIDNAYFELTELLSELTEYHLSQDIDCKQIEAILSRRDMSRTHKAEELAGVLHVDLKNKPYKELIRGLCGLKFNACVVFPDVQSEEVTKLDICLSESTFDEKSDEIANIIGEDYFEIIMAMKEMFDIGSLASIMKGHNYLSQARVASYTKHKEDLKLLKEVIKKYCGKKEYDKFFNSDADGSYASYVGSYNSKNKERRVGNKRTSEELYKEIKKLLKDAQKEDENIQKILTSIENETFLPKQLTASNGVIPNQVHAREMKKILSNAENYLPFLTEKDETGLSVSERILKLFTFQIPYYVGPTSENSGKNGGNGWVVRREDGQVLPWNIDEKIDMKATSEAFISRMVRRCTYISGEQVLPKASLEYQSYCVLNEINNIKIDGERISVELKQDIYKAVFQKGKKVTKKQLCKYLHTRGIIETEEQVTGVDVSINNALTTYGKFKPIFGEDISKDSVQKMIEDIVFWCTVYGDSKKFLKDRIEEKYGNKLSEEQIKRILGFKFKDWGNLSKKFLELNGADTSTGESISIIRALWNNNLNLMELINSSLYNYKECLAEYQNTMLKTLSEIEAEDLNEYYFSAPVRRMIWQTILVIKELVKVLGYEPERIFVEMTRKPDEHKTRTSSRRNKFEELYKKVKDETTDWMQVIANAEEDGKIRSKKMYLYLTQKGRCMYTGKHIELDDLFDNNLYDIDHIYPRHFVKDDNIDNNLVLVCKEKNAHKSDHYPIEEEIFLSQKKMWLELRKSGFITEEKYNRLMGRSPFSDEQKAGFIARQLVETSQGTKGVANILRQLLPGSKIVYAKASNVSEFRHTRDDIPKSRLVNDFHHAHDAYLNIVVGNVYYVKFTQNPLNFIKKDYDKYKEDYNLSKMFDWDVKRNGEVAWIAQRKDGEAGTITTVKKMLSRNTPLMTRYSFEGKGGLANETLYSAKKAKGEGYIPFKSSDDKMQDVTKYGGFTKVTGAYFFLVEHTEKKKRIRTIESVPVYFVQKIEKNPGELKKYCEEILGLVDADIRLKKIKIGSLIKRNGYFCYITGKTGNRLSVRNAVNLCLKNEWIKYISKLEKVKEKDTIDEIITKEKNEVLYSELIQKFKHCIFSKRPNPVGDKLEKGSEKFSNLSIKDQCAVLCQVLRMAAILGSECDMTLLGESSICGEMKISKKIGDEEIYLINQSVTGLYEKKINLHTV

SEQ ID NO: 3148 - protein, 1358 aa, Unknown
  Description of Unknown: uncultivated organism sequence
  Category: MG91 effectors
  Description: MG91-340 effector
MEKEYYLGLDMGTNSVGWAVTDDAYNLIRFKGKDMWGIREFDEANPAVERRTHRTSRRRKQRNAVRMGLIRSYFADEIQKVDSNFYQRLDNSFFHVEDKQDNVKDKNGIFNDKNYKDADYYKQYPTIFHLRKELIEDASQKDVRLVYLAVANMFKHRGHFLLSGIGSESSKQTITDLYNQVSGLITEEYGISLKTDIAGTDFEQVLCSREYSRTRKSEKVCEILEIKNSDKLKKAFVKSMCGLSVKITDIIDDTFTEISDEDKKITFSFVDSDYDEKAGVLEEKLGTDVYDIISKLKEIHDKAQVAEIMKNYQYLSFARVADYEKHKKDLKILKRVVKKYFEPTVYDKLFRSEENGTYSAYVNSFNSEEKSRRNYKERKQEDLYNSIKKLLKSVDNVDDTDIEYIKNEMDKENFLPKQLTFKNGVIPNQIHASELKAILKNAEKYLPFLNEKDESGYTVSERILMLFSFQIPYYVGPVSSNSNGWVKRLEPGQVLPWNIDKKIDLKETSEQFIQRMVRNCTYIAGEKVLPKASLLYENFKVLNEINNLSINGERITVNLKQDLYNTLFLKGKRVTRKQIFNYFHSRGLVEEDSQISGIDIAVNNSLSTYGKFLPLFGEHLKEDKYKKMVDDIVFWCTVYGDSRKFLREQLEEKYSDVLDENQIKRITGMKFKDWGNLSKEFLELSGCCKSTGEVMPLIRAMWETNYNLMELLHSEEFTYSEELEEKQGKIEKVLSEYTIDDLNEEYFSAPVKRMVWQTLLIIKEIEKIMKCPPTRIFVEMTRKDDEKGDNGRKSSRKDQLLALYKKIQSEDKEWKKEMSSRIEDYDKKGALRSKKLYLYFIQKGLDMYTGKPIDLDNLMSANSNYDIDHIYPRHFVKDDNINNNLVLASKPANAEKSDIYPIKDSIYQKMKYTWKVLRDEGLITEEKYKRLTGRNPFTDEQKAGFIARQLVETGQGTKGVADLLTALLPDTKLVYSKAGNVSDFRKKYDIPKSRLINDFHHAHDAYLNIVVGNIYFTKFTSNPLNYIRKECSSKDNKYQYNLGNMYKWDVKRDGKTAWIAAKEGETGTIATVKKMLSRNTPTLTRLTIEGHGGIADATLYSHKKAKQDAYIPLKSSDARMADVTKYGGYSSVTTAYLFLVEHEIKGKKIRTLETVPLYLKDRLENSKEKLEEYCRETLGYTNPSVRMKKIKLQSLIKLNGYYMQISGKTNKQFTVRNYVQFCLNSKWVDYIYKLEKYQDKGVIDDAITDEKNVELYNVLCEKHSVGIFTLRPNPVGDKIKKGYDKFVNLTTEEQIKLLIEIIKLTCVGIVSANLTLIGGASISGKMLISKNITDAKECLLINQSVTGLYENRIDLLRV

SEQ ID NO: 3149 - protein, 1352 aa, Unknown
  Description of Unknown: uncultivated organism sequence
  Category: MG91 effectors
  Description: MG91-341 effector
MQEKPYYLGLDMGTNSVGWAVTDQHYNLLKAKGKDLWGIREFIEADTSVERRTHRISRRRRQREQARIGLLNDYFHDAIIAIDPSFFQRLENSKYHLEDKDQNVRYKYNIFNDPDYTDADYYTQYPTIYHLRKELLENPKPHDVRLVYLALLNMFKHRGHFLNSGISDGNNERSLKDAYINFAISVSELTEDYFNQDVDYSTIEGILSSRDLNRTKKAEELSTVLGIDFKNKKYKEYLRAICGLKINAYTLFSDQLPDDTTKIDLCVSDASFDEKSEELVSLIGEDLFQIILNIKEIYDIGSLAGILKGYTYLSQARVAAYDKHKHDLKLLKSSIKKYCTKEEYNNFFNSDADGSYASYIGSFNSGNKERRVGSKRTSEDLYKEIKKLLKGANKSDPAINEIFTSIETESFLPKQLTASNGIIPNQVHSKEMARILTNAENYLPFLKETDENNLSISNRILQLYKFQIPYYIGPVTEKSQRDGGNGWVIRKDNGRVFPWNIEEKIDVKATSEAFISRMVRRCTYMNGKQVLPKASLEYESFRVLNEINNLRIDGERIPVTLKQDIYTDLFQKGKKVTKKQLCNYLATRGLIESSEQVTGIDIAINNSLSTYGKFKAIFGEDIKLDHIQHMIDDIVFWCTVYGDSKQFLKEQIEDKYKGKLSPEQMKRILGFKFKDWGNLSKEFFELKGADKSTGEAVSIIRALWENNLNLMELINSSEFDFKEQLADYEANSLKTLSDFEPEDLNDYYFSAPVRRMIWQTTLIIKELVHVLGKEPARIFIEMTREKDASRGRTLSRKKKFEDLYKNVKDENTDWAKVIEHADESGTIRSKKMYLYLTQKGRCMYTGNHIELSDLFNDNLYDIDHIYPRHFVKDDNIDNNLVLVTKEKNAHKSDNYPLEAEIFNKQRNMWTQLRKEGFISEEKYNRLMGRNAFTDEQKAGFIARQLVETSQGTKGVAELFHQLLPNSKIVYAKAGNVSDFRRNRELPKSRLVNDFHHAHDAYLNIVVGNVYYVKFTQNPINYIKNSYNKDMNKNNYNLSRMFDWDVKRGDEVAWIAQKQDGAAGTISTVKKMLSKNTPLMTRLSYEGKGALANETLYSAEKAKGEGYIPFKSSDTKIQDVTKYGGFTSVTGAYFFLVEHDEKKKRIRTIESVPLYLADKIDKDSSELERYCDKLGLVNYDVRVRKIKIGSLIKYNGYFCYITGKTGYRLIVRNATNLCLTSNWRKYIKKIEKYKETTIIDNVITAEENIKLYNELLNKFTVGIFGRRPNPIGEKMDSARDKFASLSIENQCLALYQILQLTAILGNESDLQLIGASTHAGKMLISKKIGTDEIYLINQSPTGLFETKIDLQTI

SEQ ID NO: 3150 - protein, 1358 aa, Unknown
  Description of Unknown: uncultivated organism sequence
  Category: MG91 effectors
  Description: MG91-342 effector
MEKEYYLGLDMGTNSVGWAVTDDAYNLIRFKGKDMWGIREFDEANPAVERRTHRTSRRREQRNAVRMGLIRSYFADEIQKVDSNFYQRLDNSFFHVEDKQDNVKDKNGIFNDKNYKDADYYKQYPTIFHLRKELIEDASQKDVRLVYLAVANMFKHRGHFLLSGIGSESSKQTITDLYNQVSGLITEEYGISLKTDIAGTDFEQVLCSREYSRTRKSEKVCEILEIKNSDKLKKAFVKSMCGLSVKITDVIDDTFTEISDEDKKITFSFVDSDYDEKAGVLEEKLGTDVYDIISKLKEIHDKAQVAEIMKNYQYLSFARVADYEKHKKDLKILKRVVKKYFEPTVYDKLFRSGENGTYSAYVNSFNSGEKSRRNYKERKQEDLYNSIKKLIKSIDNVCDTDIEYIKNEIEKENFLPKQLTFKNGVIPNQIHASELKAILKNAEKYLPFLNEKDESGYTVSERILMLFSFQIPYYVGPVSPNSNGWVKRLEPGQVLPWNIDKKIDLKETSEQFIQRMVRNCTYIAGEKVLPKASLLYENFKVLNEINNLSINGERIAVALKQDLYNTLFLKGKRVTRKQIFNYFHSRGLVEEDSQISGIDIAVNNSLSTYGKFLPLFGEHLKEDKYKKMVDDIVFWCTVYGDSRKFLREQIEEKYSDVLDENQIKRITGMKFKDWGNLSKEFLELSGCCKSTGEMIPLIRAMWETNYNLMELLHSEEFTYSEELEEKQGKIEKVLSEYTIDDLNEEYFSAPVKRMVWQTLLIIKEIEKIMKCPPTRIFVEMTRKDDEKGDNGRKSSRKDQLLALYKKIQSEDKEWKKEMSSRIEDYDKNGALRSKKLYLYFIQKGLDMYTGKPIDLDNLMSANSNYDIDHIYPRHFVKDDNINNNLVLASKPANAEKSDIYPIKDSIYQKMKYTWKVLRDEGLITEEKYKRLTGRNPFTDEQKAGFIARQLVETGQGTKGVADLLTALLPDTKLVYSKAGNVSDFRKRYDIPKSRLINDFHHAHDAYLNIVVGNIYFTKFTSNPLNYIRKECSSKDNKYQYNLGNMYKWDVKRDGKTAWIAAKEGETGTIATVKKILSRNTPTLTRLTIEGHGGIADATLYSHKKAKQDAYIPLKSSDARMADVTKYGGYSSVTTAYLFLVEHEIKGKKIRTLETVPLYLKDRLENSKEKLEEYCRESLGYTNPSVRMKKIKLQSLIKLNGYYMQISGKSIKQFEVRNYVQICLNGKWVDYIHKLEKYHDKGVIDNAITDEKNVELYNILCEKHSVGIFTLRPNPVGDKIKKGYDKFVNLTTEEQIKLLIEIIKLTCVGIVKADLRLIGASEKSGTMKINKNITDAKECFLINQSVTGLYENRIDLLRV

SEQ ID NO: 3151 - protein, 1358 aa, Unknown
  Description of Unknown: uncultivated organism sequence
  Category: MG91 effectors
  Description: MG91-343 effector
MEKEYYLGLDMGTNSVGWAVTDDAYNLIRFKGKDMWGIREFDEANPAVERRTHRTSRRREQRNAVRMGLIRSYFADEIQKVDSNFYQRLDNSFFHVEDKQDNVKDKNGIFNDKNYKDANYYKQYPTIFHLRKELIEDVSQKDVRLVYLAVANMFKHRGHFLLSGIGSESSKQTITDLYNQVSGLITEEYGISLKTDIAGTDFEQVLCSREYSRTRKSEKVCEILEIKNSDKLKKAFVKSMCGLSVKITDVIDDTFTEISDEDKKITFSFVDSDYDEKAGVLEEKLGTDVYDIISKLKEIHDKAQVAEIMKNYQYLSFARVADYEKHKKDLKILKRVVKKYFEPTVYDKLFRSGENGTYSAYVNSFNSGEKSRRNYKERKQEDLYNSIKKLLKSIDNVCDTDIEYIKNEIEKENFLPKQLTFKNGVIPNQIHVSELKAILKNAEKYLPFLNEKDESGYTVSERILMLFSFQIPYYVGPVSPNSNGWVKRLEPGQVLPWNIDKKIDLKETSEQFIQRMVRNCTYIAGEKVLPKASLLYENFKVLNEINNLSINGERITVNLKQDLYNTLFLKGKRVTRKQIFNYFHSRGLVEEDSQISGIDIAVNNSLSTYGKFLPLFGEHLKEDKYKKMVDDIVFWCTVYGDSRKFLREQLEEKYSDVLDENQIKRITGMKFKDWGNLSKEFLELSGCCKLTGEVMPLIRAMWETNYNLMELLHSEEFTYSEELEEKQGKIEKVLSEYTIDDLNEEYFSAPVKRMVWQTLLIIKEIEKIMKCPPTRIFVEMTRKDDEKGDNGRKSSRKDQLLALYKKIQSEDKEWKKEMSSRIEDYDKKGALRSKKLYLYFIQKGLDMYTGKPIDLDNLMSANSNYDIDHIYPRHFVKDDNINNNLVLASKPANAEKSDIYPIKDSIYQKMKYTWKVLRDEGLITEEKYKRLTGRNPFTDEQKAGFIARQLVETGQGTKGVADLLTALLPDTKLVYSKAGNVSGFRKRYDIPKSRLINDFHHAHDAYLNIVVGNIYFTKFTSNPLNYIRKECSSKDNKYQYNLGNMYKWDVKRDGKTAWIAAKEGETGTIATVKKILSRNTPTLTRLTIEGHGGIADATLYSHKKAKQDAYIPLKSSDARMADVTKYGGYSSVTTAYLFLVEHEIKGKKIRTLETVPLYLKDRLENSKEKLEEYCRETLGYTNPSVRMKKIKLQSLIKLNGYYMQISGRTGNRFTLRNYVQLCLNGKWVDYIHKLEKYQDKGFIDNVITDEKNVELYNVLCEKHNVGIYTMRPNPVGDRIKNGYDKFVNLTIEEQIKLLIEIIKLTCVGIVSADLTLIGGASISGKMLISKNITDAKECLLINQSVTGLYENRIDLLRV

SEQ ID NO: 3152 - protein, 1347 aa, Unknown
  Description of Unknown: uncultivated organism sequence
  Category: MG91 effectors
  Description: MG91-344 effector
MEEKEYYLGLDMGTNSVGWAVTDPQYRILRAKGKDMWGIREFESAETAEKRRGHRTSRRRRQREVVRMGLVKDYFSDAINNVDGNFYARLENSKYHLEDKDEAVRNKNGIFADEHYTDKEYYAEYPTIYHLIMELINNPAPHDVRLVYLAVANLFKRRGHFLNAGLSEDGGNQSMQTAYDEFNTTCNETIGFSFPGIDATQIEEVLKNRNYSKTVKSEKLAELLGVEKKEKQRIEILRAIAGRKVNAKVIFPNVETEDKVEFSFSDAAFDDNATELMTLLGDECYSLVLCMREMYDIGTLAEIMHGYQYLSESRMADYQKHHEDLVLLKSVIKSECTQKQYDELFRLDGEGSYSAYVNSTLAKNHKQRRSMKGRTRDDFYKKVRGLIGKSSNPDAIKICTEIENETFMPKMLTSANGIIPNQVHYKELKAILSNAEKYLPFLLEKDESGLTTSDRIQRLYKFRIPYYVGPVSNRDGKGNGWAVRKEEGMVLPWNLEEKIDLSKTKEAFIENLIRRCTYISDEKVLPKNSLIYEKFTVLNEINNIRINDERISVELKQDIYNELFKKGKKVTRKTLVKYLINRGVIEAENQISGIDIAINNSLSSYGKFKAVFGESMDTDTTKKMVEDIIKTSTIYGDDKRELKNILRDKYGEILSEDQIKRIAGFRFKDWGRLSRAFLELAGADRSTGEVTSIIQALWESQLNLMELLHSEDYTFGESLNEKLVKNEKSLSEITAEDLDDYYFSAPVKRMAWQTILLIKEISKIKGCEPSKIFIEMTRTDEEKGDKGRKNSRAKELTALYKNIKKEGKAWIELIGKEDASGRLKSKKMYLYIKQMGRDMYTGEQIDLDRLFDDNLYDIDHIYPRHFVKDNNIENNLVLVNKAKNSRKSDNYPLDSDIVRNPKVRELWEMLHTNHLMSDEKYHRLTSRKAFTDEDLAGFIARQLVETGQATKGVADLLKELTSSEIIYSKAGNVSDFRHAYDIPKSRIVNEFHHAHDAYLNIVVGNAYYTKFTSNPLNYIRNEYKKNTKENNYHLNKIFESTISRNGYVAWLAGSDKNPGTIQTVKKMLSRNTPLMTRMTFVVHGSIADETLYGKNTAKEDSYLPLKGSDPRMSVEKYGGFNKASGAYFFLVEHELKGKKVRTIETVPVYLMKKLSDERELQKYCEEKLGLINPSIRLKQIKMQSLIKLDGYFVNVTGRTNQRLTLRNAVNLKLDKEDIYIIHLVEKCIGEERDDRLSEESILSLYQTLTEKQASGIYRNRPNSVYEKLNEGMIRFNNLERKQQIKVLANILNLTMVGKAQADLKDIGGSANSGVMLMAKKINNYNEVKLINQSVTGLYQTEVDLLTV

SEQ ID NO: 3153 - protein, 1352 aa, Unknown
  Description of Unknown: uncultivated organism sequence
  Category: MG91 effectors
  Description: MG91-345 effector
MTAFKYYLGLDMGTNSVGWAATDPEYRLLKAKGKDLWGIREFNEASGAVERRTHRISRRRKQREQVRIGILKDYFHDAICEVDPSFFQRLENSKYHEEDKDVEVRYKNNIFNDSNYTDKDYFNEYPTIYHLRNELISSTEKHDVRLVFLALLNMFKHRGHFLNAGLGENNGESNIDNAYFELTELLSELTEYHLSQDIDCKQIEAILSRRDMSRTHKAEELAGVLHVDLKNKPYKELIRGLCGLKFNACVVFPDVQSEEVTKLDICLSESTFDEKSDEIANIIGEDYFEIIMAMKEMFDIGSLASIMKGHNYLSQARVASYTKHKEDLKLLKEVIKKYCGKKEYDKFFNSDADGSYASYVGSYNSKNKERRVGNKRTSEELYKEIKKLLKDAQKEDENVQKILTSIENETFLPKQLTASNGVIPNQVHAREMKKILSNAENYLPFLTEKDETGLSVSERILKLFTFQIPYYVGPTSENSGKNGGNGWVVRREDGQVLPWNIDEKIDMKATSEAFISRMVRRCTYISGEQVLPKASLEYQSYCVLNEINNIKIDGERISVELKQDIYKAVFQKGKKVTKKQLCKYLHTRGIIETEEQVTGVDVSINNALTTYGKFKPIFGEDISKDSVQKMIEDIVFWCTVYGDSKKFLKDRIEEKYGNKLSEEQIKRILGFKFKDWGNLSKKFLELNGADTSTGESISIIRALWNNNLNLMELINSSLYNYKECLAEYQNTMLKTLSEIEAEDLNEYYFSAPVRRMIWQTILVIKELVKVLGCEPERIFVEMTRRPDEHKTRTSSRRNKFEELYKKVKDETTDWMQVIANAEEDGKIRSKKMYLYLTQKGRCMYTGKHIELDDLFDNNLYDIDHIYPRHFVKDDNIDNNLVLVCKEKNAHKSDHYPIEEEIFLSQKKMWLELRKSGFITEEKYNRLMGRSPFSDEKKAGFIARQLVETSQGTKGVANILRQLLPGSKIVYAKASNVSEFRHTRDDIPKSRLVNDFHHAHDAYLNIVVGNVYYVKFTQNPLNFIKKDYDKYKEDYNLSKMFDWDVKRNGEVAWIAQRKDGEAGTITTVKKMLSRNTPLMTRYSFEGKGGLANETLYSAKKAKGEGYIPFKSSDDKMQDVTKYGGFTKVTGAYFFLVEHTEKKKRIRTIESVPVYLAQKIEQNPDELKKYCEEILGLVDADIRLKKIKIGSLIKRNGYFCYITGKTGDRLSVRNAVNLCLKNEWIKYISKLEKVKEKDTVDEIITKEKNEVLYSELIQKFKHGIFSKRPNPVEDKLEKGSEKFSNLSIKEQCAVLCQILQLAAVLGSECDMTLLGESAHCGKMLISKKIGDEEIYLLNQSVTGLYEKKINLHTV

SEQ ID NO: 3154 - protein, 1359 aa, Unknown
  Description of Unknown: uncultivated organism sequence
  Category: MG91 effectors
  Description: MG91-346 effector
MRETGKDYYLGLDMGTNSVGWAVTDENYVLMRAKGKDLWGIREFDEALTAVDRRTHRVARRRRQRETARIGLLKEYFHDAIAEVDPDFYQRLDNSKYHEEDKDSAVKGKNGIFNDANYNDKDYFKQYPTIFHLRKELIESTEKHDVRLVYLALLNMFKHRGHFLNAGLSTESENTMDTAYHNFVETAAQTIECNFMETVDIEKIKEILGSRDYSRSKKAELVAQILHVDSKNKVQMACIKCICGLKVTAAAIFGDKMAADEEKKTDICFSDFGYDEKVPVILEIVGEENFELVLAMQEIYDIGSLAGIMKDSLYLSMARVKEYEQHGKDLRILKGVVKKYGTKEEYDTLFRTMEEGTYSAYVNSVNTKKKSRRDVKKRTRDEFYGRLKKIISKMPQNDSDVLYIKDKMEKEAFLPKQLTASNGVIPNQIHAREMKKILQNAEIYLPFLKEKDTSGLTVSERILKLFSFQIPYYVGPVSEKSKLNGGNGWVVRKEEGTVLPWNIEEKIDMTATSREFVERMVRRCSYLSDERVLPKGSLLYERFCVLNEINAIKVDGVKIPVEIKQDLYSKYFKKGKKVTKKKIAEFLIARGVIKEDQTELISGIDIAVNSTLSTYAKFYAIFGEKMEQDSYKKMVEQIVEWCTIYGDAKKFLEQKIKECYGNILTQEEIKRITGFKFRDWGRLSKEFLELSGCSKATGEVMPLISMMWETNDNLMELLDDNYYTYREALEEKQNNAFKLLADIEPEDLDEMYFSAPVKRMVWQTLCIIKELEKVLGKAPKRLFVEMTRNEQKDKKRTDSRKQQFLDLYKNIKDESRDWKELITRADENGTLKSKKMYLYLTQRGRCMYTGHPIDLEDLFKDNRYDIDHIYPRHFVKDDNIMNNLVLVEKEKNAHKSDNYPLEEEIYKKQLPMWKDLHQRKLITDEKFKRLTGRNEFTDEQKAGFIARQLVETSQGTKGVTTILERALPDTKIVYAKASNVSEFRQKRDLLKSRVVNDFHHAQDAYLNIVVGNVYFVKFTQNPLHFIKAEYDKNKAQYEYNLSRMFDRDVRRGNETAWIGCKKGEEAGTILTVKKMMAKNTPMLTRLSFEGKGGLADQTLYSAEKAKGNGYIPLKTSDSKMQDVTKYGGFNSVSTAYFFLVEHELKGKKVRTLETVPIIWRDRIEKDETMLLKYCTDVLELKNPSIRVKKIKLQSYIKKDGYYMYITGKTNKQITTKNAVELCVNQRWIDYIKIIEKTVEKKKEECEEIDYDKNVEFYDLLLTKHTQEIFSNRPNPVGAKLKQGRDKFVSLTLLEQCRVLYEILQLSIIGNTRADLQLIGGAAISGVMLLSKNITDSKEFILINQSVTGLFEQKVDLLTV

SEQ ID NO: 3155 - protein, 1359 aa, Unknown
  Description of Unknown: uncultivated organism sequence
  Category: MG91 effectors
  Description: MG91-347 effector
MLNTPYYLGLDMGTNSVGWAVTDKNYNLLRAKGKDLWGIREFSDSATSVDRRSYRIRRRRRQREQARIGLLKYYFNDSIIAKDPSFFQRLENSKYHLEDKDEAVKYKFNIFNDKTYTDIDYYTQYPTIYHLRKELLESSEPHDVRLVYLALLNMFKHRGHFLNAEIGDVAEERKLKDAYIDFCSCVSELTNESFNLDIDYSAVEEILSSRDISRTKKSEALASILNIDVKNKKYKEYVKAICGLKVNAYTLFSEQLSDEVKRIDICVSDASFDTKREDYISILGEDLFQIILYIKEIYDIGSLAGILKGYSYLSFARVATYEKHKSDLRKLKDCIRKYCSKEDYNQFFNSDAAGFYASYIGSFNSGKKQRRVGKNTTSEDLYKEIKKILKNADKNDPEIIDIFSSIDTESFLPKQLTASNGVIPNQVHYKEMAKILSNAESYLPFLREKNESNLSVSERILQIYKFQIPYYIGPVTEKSHRDGGNGWVIRKSNGRVLPWNINEKIDVKATSEAFISRMVRRCTYMNGAQVLPKASLEYESFRVLNEINNLRIDGERIPVDLKQAIYIDIFQKGKKITADILHKYLFNKGYIQSSEQVTGIDININNSLSTYGKFKVIFGEDIKLDSVQHMIEDIVFWCTVYGDSKKFLQEQIEEKYSDKISKEQLKRILGFKFKDWGSLSKEFFELKATDKSTGENISIIRALWENNLNLMELINSSKFNFKERLEEYRITSLKTLSDFEPEDLREYYFSAPVRKMIWQTMLVIKELVHVLGHEPERIFIEIPRDKDPSIGRTISRKKKFEELYKNVKDESVDWMNVIEHADDSGSLRSKKMYLYLTQKGRCMYTGEHIELSDLFNKSLYDIDHIYPRHFVKDDNIDNNLVLVKREKNAHKSDNYPLEAEIFNNQKKMWAQLRKEDFINEEKYKRLMGRNPFTDEQKAGFIARQLVETQQGTKGVAELLQQLLPNSKIVYTKAGNVSDFRHSREIPKSRLINDFHHAHDAYLSIVVGNVYYVKFTQNPINFIKNAYNKDSSKNNYNLTRMFDWDVKRRDEVAWIAQNKNGTVGTIAIVKKMLKRNTPLMTRLSYEGKGGLTKETLYSAEKAKGEGYIPFKSSDKKMQDVTKYGGFTSVKGAYFFLVEHDEKKKQIRTIESVPLYLADKIEKDPAELERYCQKLGLVNYNIRVRKIKIGTLIKRNGYFAYLTGKTGKQLILRNATNLCLDSKWGTYIKKIEKYKDTGVLDNTLDTDTNIKLYNELLDKFTTGIYGKRPNPIGDKMLSAKNTFTSFTLDNQCNLIYQILQLSKILGFETDLSLLHTNKKSDKPTREGGMQISKKVSNTTSMYLINQSPTGLFEKQIDLLTV

SEQ ID NO: 3156 - protein, 1359 aa, Unknown
  Description of Unknown: uncultivated organism sequence
  Category: MG91 effectors
  Description: MG91-348 effector
MRETGKDYYLGLDMGTNSVGWAVTDENYVLMRAKGKDLWGIREFDEALTAVDRRTHRVARRRRQREIARIGLLKEYFHDAIAEVDPDFYQRLDNSKYHEEDKDSAVKGKNGIFNDANYNDKDYFKQYPTIFHLRKELIESTEKHDVRLVYLALLNMFKHRGHFLNAGLSTESENTMDTAYHNFVETAAQTIECNFMETVDIEKIKEILGSRDYSRSKKAELVAQILHVDSKNKVQMACIKCICGLKVTAAAIFGDKMAADEEKKTDICFSDFGYDEKVPVILEIVGEENFELVLAMQEIYDIGSLAGIMKDSLYLSMARVKEYEQHGKDLRILKGVVKKYGTKEEYDTLFRTMEEGTYSAYVNSVNTKKKSRRDVKKRTRDEFYGRLKKIISKMPQNDSDVLYIKDKMEKEAFLPKQLTASNGVIPNQIHAREMKKILQNAEIYLPFLKEKDTSGLTVSERILKLFSFQIPYYVGPVSEKSKLNGGNGWVVRKEEGTVLPWNIEEKIDMTATSREFVERMVRRCSYLSDERVLPKGSLLYERFCVLNEINAIKVDGVKIPVEIKQDLYSKYFKKGKKVTKKKIAEFLIARGVIKEDQTELISGIDIAVNSTLSTYAKFYAIFGEKMEQDSYKKMVEQIVEWCTIYGDAKKFLEQKIKECYGNVLTQEEIKRITGFKFRDWGRLSKEFLELSGCSKATGEVMPLISMMWETNDNLMELLDDNYYTYREALEEKQNNAFKLLADIEPEDLDEMYFSAPVKRMVWQTLCIIKELEKVLGKAPKRLFVEMTRNEQKDKKRTDSRKQQFLDLYKNIKDESRDWKELITRADENGTLKSKKMYLYLTQMGRCMYTGHPIDLEDLFKDNRYDIDHIYPRHFVKDDNIMNNLVLVEKEKNAHKSDNYPLEEEIYKKQLPMWKDLHQRKLITDEKFKRLTGRNEFTDEQKAGFIARQLVETSQGTKGVTTILERALPDTKIVYAKASNVSEFRQKRDLLKSRVVNDFHHAQDAYLNIVVGNVYFVKFTQNPLHFIKAEYDKNKAQYEYNLSRMFDRDVRRGNETAWIGCKKGEEAGTILTVKKMMAKNTPMLTRLSFEGKGGLADQTLYSAEKAKGNGYIPLKTSDSKMQDVTKYGGFNSVSTAYFFLVEHELKGKKVRTLETVPIIWRDRIEKDETMLLKYCTDVLELKNPSIRVKKIKLQSYIKKDGYYMYITGKTNKQITTKNAVELCVNQRWIDYIKIIEKTVEKKKEECEEIDYDKNVEFYDLLLTKHTQEIFSNRPNPVGAKLKQGRDKFVSLTLLEQCRVLYEILQLSIIGNTRADLQLIGGAAISGVMLLSKNITDSKEFILINQSVTGLFEQKVDLLTV

SEQ ID NO: 3157 - protein, 1359 aa, Unknown
  Description of Unknown: uncultivated organism sequence
  Category: MG91 effectors
  Description: MG91-349 effector
MQEKPYYLGLDMGTNSVGWAVTDQHYNLLKAKGKDLWGIREFIEADTSVERRTHRISRRRRQREQARIGLLNDYFHDAIIAIDPSFFQRLENSKYHLEDKDQNVRYKYNIFNDPDYTDADYYTQYPTIYHLRKELLENPKPHDVRLVYLALLNMFKHRGHFLNSGISDGNNERSLKDAYINFAISVSELTEDYFNQDVDYSTIEEILSSRDLNRTKKAEELSTVLGIDFKNKKYKEYLRAICGLKINAYTLFSDQLPDDTTKIDLCVSDASFDEKSEELVSLIGEDLFQIILNIKEIYDIGSLAGILKGYTYLSQARVAAYDKHKHDLKLLKSSIKKYCTKEEYNNFFNSDADGSYASYIGSFNSGNKERRVGSKRTSEDLYKEIKKLLKGANKSDPAINEIFTSIETESFLPKQLTASNGIIPNQVHSKEMARILTNAENYLPFLKETDENNLSISNRILQLYKFQIPYYIGPVTEKSQRDGGSGWVIRKDNGRVFPWNIEEKIDVKATSEAFISRMVRRCTYMNGKQVLPKASLEYESFRVLNEINNLRIDGERIPVTLKQDIYTDLFQKGKKVTKKQLCNYLATRGLIESSEQVTGIDIAINNSLSTYGKFKAIFGEDIELDHIQHMIEDIVFWCTVYGDSKQFLKEQIEDKYKGKLSPEQMKRILGFKFKDWGNLSKEFFELKGADKSTGEAVSIIRALWENNLNLMELINSPEFDFKEQLADYEANSLKTLSDFEPEDLNEYYFSAPVRRMIWQTTLIIKELVHVLGKEPARIFIEMTREKDASRGRTLSRKKKFEDLYKNVKDENTDWAKVIEHADESGTIRSKKMYLYLTQKGRCMYTGNHIELSDLFNDNLYDIDHIYPRHFVKDDNIDNNLVLVTKEKNAHKSDNYPLEAEIFNKQRNMWTQLRKEGFISEEKYNRLMGRNAFTDEQKAGFIARQLVETSQGTKGVAELFHQLLPNSKIVYAKAGNVSDFRRNRELPKSRLVNDFHHAHDAYLNIVVGNVYYVKFTQNPINYIKNSYNKDMNKNNYNLSRMFDWDVKRGDEVAWIAQKQDGAAGTISTVKKMLSKNTPLMTRLSYEGKGALANETLYSAEKAKGEGYIPFKSSDAKIQDVTKYGGFTSVTGAYFFLVEHDEKKKRIRTIESVPLYLADKIDKNSSELERYCDKLGLVNYDIRVRKIKIGSLLNRNGYFAYLTGKTGKQLILRNATNLCLDKKWTIYIKKIEKYKETNLLDSIITSETMVNLYNELLNKFTVGIYGRRPNPIGEKMDSAKNTFTSYTLDNQCNLIYQILQLSKILGFETDLSLLRTNKQSSKPTREGGMQISKKIDNTTSMYLINQSPTGLFETKIDLQTI

SEQ ID NO: 3158 - protein, 1352 aa, Unknown
  Description of Unknown: uncultivated organism sequence
  Category: MG91 effectors
  Description: MG91-350 effector
MLEKPYYLGLDMGTNSVGWAVTDQQYNLLKAKGKDLWGIREFAEADTSVERRTHRISRRRRQREQARIGLLNDYFHDAIIAIDPSFFQRLENSKYHLEDKDQNVRYKYNIFNDPDYTDADYYTQYPTIYHLRKELLENPKPHDVRLVYLALLNMFKHRGHFLNSGISDGNNERSLKDAYINFAISVSELTEDYFNQEVNYSTIEGILSSRDLNRTKKAEELSTVLGIDFKNKKYKEYLRAICGLKINAYTLFSDQLPDDTTKIDLCVSDASFDEKSEELVSLIGEDLFQIILNIKEIYDIGSLAGILKGYTYLSQARVAAYDKHKHDLKLLKSSIKKYCTKEEYNNFFNSDADGSYASYIGSFNSGNKERRVGSKRTSEDLYKEIKKLLKGANKSDPAINEIFTSIETESFLPKQLTASNGIIPNQVHSKEMARILTNAENYLPFLKETDENNLSISNRILQLYKFQIPYYIGPVTEKSQRDGGNGWVIRKDNGRVFPWNIEEKIDVKATSEAFISRMVRRCTYMNGKQVLPKASLEYESFRVLNEINNLRIDGERIPVTLKQDIYTDLFQKGKKVTKKQLCNYLATRGLIESSEQVTGIDIAINNSLSTYGKFKAILGEDIKLDHIQHMIEDIVFWCTVYGDSKQFLKEQIEDKYKGKLSPEQMKRILGFKFKDWGNLSKEFFELKGADKSTGEAVSIIRALWENNLNLMELINSPEFDFKEQLADYEANSLKTLSDFEPEDLNEYYFSAPVRRMIWQTTLIIKELVHVLGEEPARIFIEMTREKDASRGRTLSRKKKFEDLYKNVKDENTDWAKVIEHADESGTIRSKKMYLYLTQKGRCMYTGNHIELSDLFNDNLYDIDHIYPRHFVKDDNIDNNLVLVTKEKNAHKSDNYPLEAEIFNKQRNMWTQLRKEGFISEEKYNRLMGRNAFTDEQKAGFIARQLVETSQGTKGVAELFHQLLPNSKIVYAKAGNVSDFRRNRELPKSRLVNDFHHAHDAYLNIVVGNVYYVKFTQNPINYIKNSYNKDMNKNNYNLSRMFDWDVKRGDEVAWVAQKQDAAAGTISTVKKMLSKNTPLMTRLSYEGKGALANETLYSAEKAKGEGYIPFKSSDAKIQDVTKYGGFTSVTGAYFFLVEHDEKKKRIRTIESVPLYLADKIDKDSSELERYCDKLGLVNYDVRVRKIKIGSLIKYNGYFCYITGKTGYRLIVRNATNLCLASNWRKYIKKIEKYKETTIIDNVITAEENIKLYNELLNKFTVGIFGRRPNPIGEKMDSARDKFASLSIENQCLALYQILQLTAILGNESDLQLIGASTHAGKMLISKKIGTDEIYLINQSPTGLFETKIDLQTI

SEQ ID NO: 3159 - protein, 1349 aa, Unknown
  Description of Unknown: uncultivated organism sequence
  Category: MG91 effectors
  Description: MG91-351 effector
MKNYFLGLDMGTNSVGWAVTDDNYNILRAKGKDLWGIREFESANTAEERRMHRTARRNRQREVVRRGYLQSYFADAINDVDPNFFARMQNSKYYLEDKAPEARVKDVLFNDKDYHDKDYYEEYPTIYHLRMDLINNPNPHDVRLVYLAIANIFKHRGHFLNQGLGESNGESNMQIAYDRLISMLSSNYNIELPELDADQITDILKDRRYSKTVKSEKLKELIPYHDVENKKFYSEIINAISGRKVKGKNLFPELEGEDNIDFSFAESSFDDNLSEFVSKIGEERYALIEILREIYSIGSLAEIMHGCRYLSESRVKDYDKHHSDLKKLKNVIKKYCDKTVYDEIFRSDDNGTYSAYVNSVNSSTSGKIRRNMKDRKRDDFYSKIKKIVGGMPKEDSDVQDILSDIDRETFMPKMLTSDNGIIPNGVHARELSAILHNAEQYLDFLRAEDENGLSVSDKILQLFKFRIPYYIGPVANYNGKGNGWAVRKANGPVLPWNISEKIDIKATKEKFIERLIRDCTYISGEKVLPKGSMLYERFMVLNEINNIRINDERIPVELKQSIYTDLFERGKRVTKNQLFKYLNNKGLVQDKEQITGLNDQIAGTLTSYGRFYQIFGEKLKEDSIKAQVEEIIKLCTIYGDDKKELANVLRDTYGNLLSDDEIRRICGYKYKDWGRLSRAFLELEGCNKQTGEITTLIQELWNTSYNLMELLHSPDYTFSETLDKQTRSSEKLLSEITPEDLNEFYFSAPVRRMVWQTILLIREITHIMGNEPGKIFIEMTRTDEEKGENGRKQSRKNELTELYKSVKDDLQNWKELIAQEDESGRLRSKKMYLYILQMGRDMYTGEPIDLDNLFNDNIYDIDHIYPRQFVKDNNLQNNMVLVNKQANSRKTNNYPLDASIASNSKVQDLWKTLHEHHLMNDEKYHRLTRRTPFSDEDKAGFIARQMVETGQATKGVADLLKELMPESRIVYSKAGNVSDFRRDYGIVKSRIVNDFHHAHDAYLNIVVGNVYLTKFTDNPLNFVKKEYSRDPEKNHYHLDKMFIWDVKRGNYTAWVKGKEGTISTVKKTLSKNSPILTRMTFEAHGQISEQTLIGKKTAKAGVYLPLKGNDARMTVEKYGGFSSAKGAYYCLVEHGTKAKRIRSIETVPIYKAAEIGDSKDELTKYLGNELGLVNPDVRIAKILMQSLFKRNGYFVYLTGRSGNQLILQNAVNLVLAYDEISYIHKLEKYSLSSIADDLTSEKNVGLYDVLSNKFNGSIFKDRPNPVGKLLISGRDKFLDLNLEEQCYVLIQILNLSKIGVAKADLKLIGGSSQSGMMKMSKTLKPDDRMELIYQSVSGIFEKRVDLLKV

SEQ ID NO: 3160 - protein, 1358 aa, Unknown
  Description of Unknown: uncultivated organism sequence
  Category: MG91 effectors
  Description: MG91-352 effector
MEKEYYLGLDMGTNSVGWAVTDDAYNLIRFKGKDMWGIREFDEANPAVERRTHRTSRRREQRNAVRMGLIRSYFADEIQKVDSNFYQRLDNSFFHVEDKQDNVKDKNGIFNDKNYKDADYYKQYPTIFHLRKELIEDASQKDVRLVYLAVANMFKHRGHFLLSGIGSESSKQTITDLYNQVSGLITEEYGISLKTDIAGTDFEQVLCSREYSRTRKSEKVCEILEIKNSDKLKKAFVKSMCGLSVKITDVIDDTFTEISDEDKKITFSFVDSDYDEKAGVLEEKLGTDVYDIISKLKEIHDKAQVAEIMKNYQYLSFARVADYEKHKKDLKILKRVVKKYFEPTVYDKLFRSGENGTYSAYVNSFNSGEKSRRNYKERKQEDLYNSIKKLLKSIDNVCDTDIEYIKNEIEKENFLPKQLTFKNGVIPNQIHASELKAILKNAEKYLPFLNEKDESGYTVSERILMLFSFQIPYYVGPVSSNSNGWVKRLEPGQVLPWNIDKKIDLKETSEQFIQRMVRNCTYIAGEKVLPKASLLYENFKVLNEINNLSINGERIAVALKQDLYNTLFLKGKRVTRKQIFNYFHSRGLVEEDSQISGIDIAVNNSLSTYGKFLPLFGEHLKEDKYKKMVDDIVFWCTVYGDSRKFLREQLEEKYSDVLDENQIKRITGMKFKDWGNLSKEFLELLGCCKSTGEMIPLIRAMWETNYNLMELLHSEEFTYSEELEEKQGKIEKVLSEYTIDDLNEEYFSAPVKRMVWQTLLIIKEIEKIMKCPPTRIFVEMTRKDDEKGDNGRKSSRKDQLLALYKKIQSEDKEWKKEMSSRIEDYDKNGALRSKKLYLYFIQKGLDMYTGKPIDLDNLMSANSNYDIDHIYPRHFVKDDNINNNLVLASKPANAEKSDIYPIKDSIYQKMKYTWKVLRDEGLITEEKYKRLTGRNPFTDEQKAGFIARQLVETGQGTKGVADLLTALLPDTKLVYSKAGNVSDFRKRYDIHKSRLINDFHHAHDAYLNIVVGNIYFTKFTSNPLNYIRKECSSKDNKYQYNLGNMYKWDVKRDGKTAWIAAKEGETGTIATVKKILSRNTPTLTRLTIEGHGGIADATLYSHKKAKQDAYIPLKSSDARMADVTKYGGYSSVTTAYLFLVEHEIKGKKIRTLETVPLYLKDRLENSKEKLEEYCRETLGYTNPSVRMKKIKLQSLIKLNGYYMQISGRTGNRFTLRNYVQLCLNGKWVDYIHKLEKYQDKGFIDNVITDEKNVELYNVLCEKHNVGIYTMRPNPVGDRIKNGYDKFVNLTTEEQIKLLIEIIKLTCVGIVSADLTLIGGAAISGKMLMSKNITDANECILINQSVTGLYENRIDLLRV

SEQ ID NO: 3161 - protein, 1358 aa, Unknown
  Description of Unknown: uncultivated organism sequence
  Category: MG91 effectors
  Description: MG91-353 effector
MEKEYYLGLDMGTNSVGWAVTDDAYNLIRFKGKDMWGIREFDEANPAVERRTHRTSRRREQRNAVRMGLIRSYFADEIQKVDSNFYQRLDNSFFHVEDKQDNVKDKNGIFNDKNYKDANYYKQYPTIFHLRKELIEDVSQKDVRLVYLAVANMFKHRGHFLLSGIGSESSKQTITDLYNQVSGLITEEYGISLKTDIAGTDFEQVLCSREYSRTRKSEKVCEILEIKNSDKLKKAFVKSMCGLSVKITDVIDDTFTEISDEDKKITFSFVDSDYDEKAGVLEEKLGTDVYDIISKLKEIHDKAQVAEIMKNYQYLSFARVADYEKHKKDLKILKRVVKKYFEPTVYDKLFRSGENGTYSAYVNSFNSGEKSRRNYKERKQEDLYNSIKKLLKSIDNVCDTDIEYIKNEIEKENFLPKQLTFKNGVIPNQIHVSELKAILKNAEKYLPFLNEKDESGYTVSERILMLFSFQIPYYVGPVSPNSNGWVKRLEPGQVLPWNIDKKIDLKETSEQFIQRMVRNCTYIAGEKVLPKASLLYENFKVLNEINNLSINGERITVNLKQDLYNTLFLKGKRVTRKQIFNYFHSRGLVEEDSQISGIDIAVNNSLSTYGKFLPLFGEHLKEDKYKKMVDDIVFWCTVYGDSRKFLREQLEEKYSDVLDENQIKRITGMKFKDWGNLSKEFLELSGCCKSTGEVMPLIRAMWETNYNLMELLHSEEFTYSEELEEKQGKIEKVLSEYTIDDLNEEYFSAPVKRMVWQTLLIIKEIEKIMKCPPTRIFVEMTRKDDEKGDNGRKSSRKDQLLALYKKIQSEDKEWKKEMSSRIEDYDKKGALRSKKLYLYFIQKGLDMYTGKPIDLDNLMSANSNYDIDHIYPRHFVKDDNINNNLVLASKPANAEKSDIYPIKDSIYQKMKYTWKVLRDEGLITEEKYKRLTGRNPFTDEQKAGFIARQLVETGQGTKGVADLLTALLPDTKLVYSKAGNVSGFRKRYDIPKSRLINDFHHAHDAYLNIVVGNIYFTKFTSNPLNYIRKECSSKDNKYQYNLGNMYKWDVKRDGKTAWIAAKEGETGTIATVKKILSRNTPTLTRLTIEGHGGIADATLYSHKKAKQDAYIPLKSSDARMADVTKYGGYSSVTTAYLFLVEHEIKGKKIRTLETVPLYLKDRLENSKEKLEEYCRETLGYTNPSVRMKKIKLQSLIKLNGYYMQISGRTGNRFTLRNYVQLCLNGKWVDYIHKLEKYQDKGFIDNVITDEKNVELYNVLCEKHNVGIYTMRPNPVGDRIKNGYDKFVNLTIEEQIKLLIEIIKLTCVGIVSADLTLIGGASISGKMLISKNITDAKECLLINQSVTGLYENRIDLLRV

SEQ ID NO: 3162 - protein, 1358 aa, Unknown
  Description of Unknown: uncultivated organism sequence
  Category: MG91 effectors
  Description: MG91-354 effector
MEKEYYLGLDMGTNSVGWAVTDDAYNLIRFKGKDMWGIREFDEANPAVERRTHRTSRRREQRNAVRMGLIRSYFADEIQKVDSNFYQRLDNSFFHVEDKQDNVKDKNGIFNDKNYKDADYYKQYPTIFHLRKELIEDASQKDVRLVYLAVANMFKHRGHFLLSGIGSESSKQTITDLYNQVSGLITEEYGISLKTDIAGTDFEQVLCSREYSRTRKSEKVCEILEIKNSDKLKKAFVKSMCGLSVKITDIIDDTFTEISDEDKKITFSFVDSDYDEKAGVLEEKLGTDVYDIISKLKEIHDKAQVAEIMKNYQYLSFARVADYEKHKKDLKILKRVVKKHFEPTVYDKLFRSEENGTYSAYVNSFNSEEKSRRNYKERKQEDLYNSIKKLLKSVDNVDDTDIEYIKNEMDKENFLPKQLTFKNGVIPNQIHASELKAILKNAEKYLPFLNEKDESGYTVSERILKLFSFQIPYYVGPVSSNSNGWVKRLESGQVLPWNIDKKIDLKETSEQFIQRMVRNCTYIAGEKVLPKASLLYENFKVLNEINNLSINDERITVNLKQDLYNTLFLKGKRVTRKQIFNYFHSRGLVEEDSQISGIDIAVNNSLSTYGKFLPLFGEHLKEDKYKKMVDDIVFWCTVYGDSRKFLREQLEEKYSDVLDENQIKRITGMKFKDWGNLSKEFLELSGCCKSTGEMIPLIRAMWETNYNLMELLHSEEFTYSEELEEKQGKIEKVLSEYTIDDLNEEYFSAPVKRMVWQTLLIIKEIEKIMKCPPTRIFVEMTRKDDEKGDNGRKSSRKDQLLALYKKIQSEDKEWKKEMSSRIEDYDKNGALRSKKLYLYFIQKGLDMYTGKPIDLDNLMSANSNYDIDHIYPRHFVKDDNINNNLVLASKPANAEKSDIYPIKDSIYQKMKYTWKVLRDEGLITEEKYKRLTGRNPFTDEQKAGFIARQLVETGQGTKGVADLLTALLPDTKLVYSKAGNVSDFRKRYDIPKSRLINDFHHAHDAYLNIVVGNIYFTKFTSNPLNYIRKECSSKDNKYQYNLGNMYKWDVKRDGKTAWIAAKEGETGTIATVKKILSRNTPTLTRLTIEGHGGIADATLYSHKKAKQDAYIPLKSSDARMADVTKYGGYSSVTTAYLFLVEHEIKGKKIRTLETVPLYLKDRLENSKEKLEEYCRETLGYTNPSVRMKKIKLQSLIKLNGYYMQISGRTGNRFTLRNYVQLCLNGKWVDYIHKLEKYQDKGFIDNVITDEKNVELYNVLCEKHSVGIFTLRPNPVGDKIKKGYDKFVNLTTEEQIKLLIEIIKLTCVGIVSANLTLIGGASISGKMLISKNITDAKECLLINQSVTGLYENRIDLLRV

SEQ ID NO: 3163 - protein, 1358 aa, Unknown
  Description of Unknown: uncultivated organism sequence
  Category: MG91 effectors
  Description: MG91-355 effector
MEKEYYLGLDMGTNSVGWAVTDDAYNLIRFKGKDMWGIREFDEANPAVERRTHRTSRRREQRNAVRMGLIRSYFADEIQKVDSNFYQRLDNSFFYVEDKQDNVKDKNGIFNDKNYKDANYYKQYPTIFHLRKELIEDASQKDVRLVYLAVANMFKHRGHFLLSGIGSESSKQTITDLYNQVSGLITEEYGISLKTDIAGTDFEQVLCSREYSRTRKSEKVCEILEIKNSDKLKKAFVKSMCGLSVKITDIIDDTFTEISDEDKKITFSFVDSDYDEKAGVLEEKLGTDVYDIISKLKEIHDKAQVAEIMKNYQYLSFARVADYEKHKKDLKILKRVVKKYFEPTVYDKLFRSEENGTYSAYVNSFNSEEKSRRNYKERKQEDLYNSIKKLLKSVDNVDDTDIEYIKNEMDKENFLPKQLTFKNGVIPNQIHASELKAILKNAEKYLPFLNEKDESGYTVSERILMLFSFQIPYYVGPVSSNSNGWVKRLEPGQVLPWNIDKKIDLKETSEQFIQRMVRNCTYIAGEKVLPKASLLYENFKVLNEINNLSINGERITVNLKQDLYNTLFLKGKRVTRKQIFNYFHSRGLVEEDSQISGIDIAVNNSLSTYGKFLPLFGEHLKEDKYKKMVDDIVFWCTVYGDSRKFLREQLEEKYSDVLDENQIKRITGMKFKDWGNLSKEFLELSGCCKSTGEVMPLIRAMWETNYNLMELLHSEEFTYSEELEEKQGKIEKVLSEYTIDDLNEEYFSAPVKRMVWQTLLIIKEIEKIMKCPPTRIFVEMTRKDDEKGDNGRKSSRKDQLLALYKKIQSEDKEWKKEMSSRIEDYDKNGALRSKKLYLYFIQKGLDMYTGKPIDLDNLMSANSNYDIDHIYPRHFVKDDNINNNLVLASKPANAEKSDIYPIKDSIYQKMKYTWKVLRDEGLITEEKYKRLTGRNPFTDEQKAGFIARQLVETGQGTKGVADLLTALLPDTKLVYSKAGNVSDFRKRYDIPKSRLINDFHHAHDAYLNIVVGNIYFTKFTSNPLNYIRKECSSKDNKYQYNLGNMYKWDVKRDGKTAWVAPEEGETGTLATVKKMLSRNTPILTRLTIEGHGGIADATLYSHKKAKQDTYIPLKSSDARMADVTKYGGYSSVTTAYLFLVEHEIKGKKIRTLETVPLYLKDRLENSKEKLEEYCRETLGYTNPSVRMKKIKLQSLIKLNGYYMQISGKTNKQFTVRNYVQFCLNSKWVDYIHKLEKYQDKGVIDDAITDEKNVELYNVLCEKHSVGIFTLRPNPVGDKIKKGYDKFVNLTTEEQIKLLIEIIKLTCVGIVSANLTLIGGASISGKMLISKNITDAKECLLINQSVTGLYENRIDLLRV

SEQ ID NO: 3164 - protein, 1352 aa, Unknown
  Description of Unknown: uncultivated organism sequence
  Category: MG91 effectors
  Description: MG91-356 effector
MTAFKYYLGLDMGTNSVGWAATDPEYRLLKAKGKDLWGIREFNEASGAVERRTHRISRRRRQREQVRIGILKDYFHDAICEVDPSFFRRLENSKYHEEDKDVEVRYKNNIFNDGNYTDKDYFNEYPTIYHLRNELISSTEKHDVRLVFLALLNMFKHRGHFLNAGLGENNGESNIDNAYFELTELLSELTEYHLSQDIDCKQIEAILSRRDMSRTHKAEELAGVLHVDLKNKPYKELIRGLCGLKFNACVVFPDVQSEEVTKLDICLSESSFDEKSDEIANIIGEDYFEIIMAMKEMFDIGSLASIMKGHNYLSQARVASYTKHKEDLKLLKEVIKKYCGKKEYDKFFNSDADGSYASYVGSYNSKNKERRVGNKRTSEELYKEIKKLLKDAPKEDENVQKILTSIENETFLPKQLTASNGVIPNQVHAREMKKILSNAENYLPFLTEKDETGLSVSERILKLFTFQIPYYVGPTSENSGKNGGNGWVVRREDGQVLPWNIDEKIDMKATSEAFISRMVRRCTYISGEQVLPKASLEYQSYCVLNEINNIKIDGERISVELKQDIYKAVFQKGKKVTKKQLCKYLHTRGIIETEEQVTGVDVSINNALTTYGKFKPIFGEDISKDSVQKMIEDIVFWCTVYGDSKKFLKDRIEEKYGNKLSEEQIKRILGFKFKDWGNLSKKFLELNGADTSTGESISIIRALWNNNLNLMELINSSLYNYKECLAEYQNTMLKTLSEIEAEDLNEYYFSAPVRRIIWQTILVIKELVKVLGCEPERIFVEMTRRPDEHKTRTSSRRNKFEELYKKVKDEATDWMQVIAKAEEDGKIRSKKMYLYLTQKGRCMYTGKHIELDDLFDKNLYDIDHIYPRHFVKDDNIDNNLVLVCKEKNAHKSDHYPIEEEIFLSQKKMWLELRKSGFITEEKYNRLMGRSPFSDEQKAGFIARQLVETSQGTKGVANILRQLLPGSKIVYAKASNVSEFRHTRDDIPKSRLVNDFHHAHDAYLNIVVGNVYYVKFTQNPLNFIKKDYDKYKEDYNLSKMFDWDVKRNGEVAWIAQRKDGEAGTITTVKRMLSRNTPLMTRYSFEGKGGLANETLCSAKKAKGEGYIPFKSSDDKMQDVTKYGGFTKVTGAYFFLVEHTEKKKRIRTIESVPVYLAQKIEQNPDELKKYCKEILGLVDADIRLKKIKIGSLIKRNGYFCYITGKTGNRLSVRNAVNLCLKNEWIKYISKLEKVKEKDAVDEIITKEKNEVLYSELIQKFKHGIFSKRPNPVEDKLEKGSEKFSNLSIKEQCAVLCQILQLAAVLGSECDMTLLGESAHCGKMLISKKIGDEEIYLLNQSVTGLYEKKINLHTV

SEQ ID NO: 3165 - protein, 1358 aa, Unknown
  Description of Unknown: uncultivated organism sequence
  Category: MG91 effectors
  Description: MG91-357 effector
MEKEYYLGLDMGTNSVGWAVTDDAYNLIRFKGKDMWGIREFDEANPAVERRTHRTSRRREQRNAVRMGLIRSYFADEIQKVDSNFYQRLDNSFFHVEDKQDNVKDKNGIFNDKNYKDADYYKQYPTIFHLRKELIEDASQKDVRLVYLAVANMFKHRGHFLLSGIRSESSKQTITDLYNQVSGLITEEYGISLKTDIAGTDFEQVLCSREYSRTRKSEKVCEILEIKNSDKLKKAFVKSMCGLSVKITDVIDDTFTEISDEDKKITFSFVDSDYDEKAGVLEEKLGTDVYDIISKLKEIHDKAQVAEIMKNYQYLSFARVADYEKHKKDLKILKRVVKKYFEPTVYDKLFRSGENGTYSAYVNSFNSGEKSRRNYKERKQEDLYNSIKKLLKSIDNVCDTDIEYIKNEIEKENFLPKQLTFKNGVIPNQIHASELKAILKNAEKYLPFLNEKDESGYTVSERILMLFSFQIPYYVGPVSPNSNGWVKRLEPGQVLPWNIDKKIDLKETSEQFIQRMVRNCTYIAGEKVLPKASLLYENFKVLNEINNLSINGERIAVALKQDLYNTLFLKGKRVTRKQIFNYFHSRGLVEEDSQISGIDIAVNNSLSTYGKFLPLFGEHLKEDKYKKMVDDIVFWCTVYGDSRKFLREQLEEKYSDVLDENQIKRITGMKFKDWGNLSKEFLELLGCCKSTGEMIPLIRAMWETNYNLMELLHSEEFTYSEELEEKQGKIEKVLSEYTIDDLNEEYFSAPVKRMVWQTLLIIKEIEKIMKCPPTRIFVEMTRKDDEKGDNGRKSSRKDQLLALYKKIQSEDKEWKKEMSSRIEDYDKNGALRSKKLYLYFIQKGLDMYTGKPIDLDNLMSANSNYDIDHIYPRHFVKDDNINNNLVLASKPANAEKSDIYPIKDSIYQKMKYTWKVLRDEGLITEEKYKRLTGRNPFTDEQKAGFIARQLVETGQGTKGVADLLTALLPDTKLVYSKAGNVSDFRKRYDIPKSRLINDFHHAHDAYLNIVVGNIYFTKFTSNPLNYIRKECSSKDNKYQYNLGNMYKWDVKRDGKTAWIAAKEGETGTIATVKKILSRNTPTLTRLTIEGHGGIADATLYSHKKAKQDAYIPLKSSDARMADVTKYGGYSSVTTAYLFLVEHEIKGKKIRTLETVPLYLKDRLENSKEKLEEYCRETLGYTNPSVRMKKIKLQSLIKLNGYYMQISGKTNKQFTVRNYVQFCLNSKWVDYIHKLEKYQDKGVIDDAITDEKNVELYNVLCEKHSVGIFTLRPNPVGDKIKKGYDKFVNLTTEEQIKLLIEIIKLTCVGIVSANLTLIGGAAISGKMLISKNITDAKECLLINQSVTGLYENRIDLLRV

SEQ ID NO: 3166 - protein, 1358 aa, Unknown
  Description of Unknown: uncultivated organism sequence
  Category: MG91 effectors
  Description: MG91-358 effector
MEKEYYLGLDMGTNSVGWAVTDDAYNLIRFKGKDMWGIREFDEANPAVERRTHRTSRRREQRNAVRMGLIRSYFADEIQKVDSNFYQRLDNSFFHVEDKQDNVKDKNGIFNDKNYKDADYYKQYPTIFHLRKELIEDASQKDVRLVYLAVANMFKHRGHFLLSGIGSESSKQTITDLYNQVSGLITEEYGISLKTDIAGTDFEQVLCSREYSRTRKSEKVCEILEIKNSDKLKKAFVKSMCGLSVKITDVIDDTFTEISDEDKKITFSFVDSDYDEKAGVLEEKLGTDVYDIISKLKEIHDKAQVAEIMKNYQYLSFARVADYEKHKKDLKILKRVVKKYFEPTVYDKLFRSGENGTYSAYVNSFNSGEKSRRNYKERKQEDLYNSIKKLIKSIDNVCDTDIEYIKNEIEKENFLPKQLTFKNGVIPNQIHASELKAILKNAEKYLPFLNEKDESGYTVSERILMLFSFQIPYYVGPVSPNSNGWVKRLEPGQVLPWNIDKKIDLKETSEQFIQRMVRNCTYIAGEKVLPKASLLYENFKVLNEINNLSINGERIAVALKQDLYNTLFLKGKRVTRKQIFNYFHSRGLVEEDSQISGIDIAVNNSLSTYGKFLPLFGEHLKEDKYKKMVDDIVFWCTVYGDSRKFLREQLEEKYSDVLDENQIKRITGMKFKDWGNLSKEFLELLGCCKSTGEMIPLIRAMWETNYNLMELLHSEEFTYSEELEEKQGKIEKVLSEYTIDDLNEEYFSAPVKRMVWQTLLIIKEIEKIMKCPPTRIFVEMTRKDDEKGDNGRKSSRKDQLLALYKKIQSEDKEWKKEMSSRIEDYDKNGALRSKKLYLYFIQKGLDMYTGKPIDLDNLMSANSNYDIDHIYPRHFVKDDNINNNLVLASKTANAEKSDIYPIKDSIYQKMKYTWKVLRDEGLITEEKYKRLTGRNPFTDEQKAGFIARQLVETGQGTKGVADLLTALLPDTKLVYSKAGNVSDFRKRYDIPKSRLINDFHHAHDAYLNIVVGNIYFTKFTSNPLNYIRKECSSKDNKYQYNLGNMYKWDVKRDGKTAWIAAKEGETGTIATVKKMLSRNTPTLTRLTIEGHGGIADATLYSHKKAKQDAYIPLKSSDARMADVTKYGGYSSVTTAYLFLVEHEIKGKKIRTLETVPLYLKDRLENSKEKLEEYCRETLGYTNPSVRMKKIKLQSLIKLNGYYMQISGKTNKQFTVRNYVQFCLNSKWVDYIHKLEKYQDKGVIDDAITDEKNVELYNVLCEKHSVGIFTLRPNPVGDKIKKGYDKFVNLTTEEQIKLLIEIIKLTCVGIVSANLTLIGGASISGKMLISKNITDAKECLLINQSVTGLYENRIDLLRV

SEQ ID NO: 3167 - protein, 1358 aa, Unknown
  Description of Unknown: uncultivated organism sequence
  Category: MG91 effectors
  Description: MG91-359 effector
MEKEYYLGLDMGTNSVGWAVTDDAYNLIRFKGKDMWGIREFDEANPAVERRTHRTSRRREQRNAVRMGLIRSYFADEIQKVDSNFYQRLDNSFFHVEDKQDNVKDKNGIFNDKNYKDADYYKQYPTIFHLRKELIEDASQKDVRLVYLAVANMFKHRGHFLLSGIGSESSKQTITDLYNQVSGLITEEYGISLKTDIAGTDFEQVLCSREYSRTRKSEKVCEILEIKNSDKLKKAFVKSMCGLSVKITDIIDDTFTEISDEDKKITFSFVDSDYDEKAGVLEEKLGTDVYDIISKLKEIHDKAQVAEIMKNYQYLSFARVADYEKHKKDLKILKRVVKKYFEPTVYDKLFRSEENGTYSAYVNSFNSEEKSRRNYKERKQEDLYNSIKKLLKSVDNVDDTDIEYIKNEMDKENFLPKQLTFKNGVIPNQIHASELKAILKNAEKYLPFLNEKDESGYTVSERILMLFSFQIPYYVGPVSSNSNGWVKRLEPGQVLPWNIDKKIDLKETSEQFIQRMVRNCTYIAGEKVLPKASLLYENFKVLNEINNLSINGERITVNLKQDLYNTLFLKGKRVTRKQIFNYFHSRGLVEEDSQISGIDIAVNNSLSTYGKFLPLFGEHLKEDKYKKMVDDIVFWCTVYGDSRKFLREQLEEKYSDVLDENQIKRITGMKFKDWGNLSKEFLELSGCCKSTGEVMPLIRAMWETNYNLMELLHSEEFTYSEELEEKQGKIEKVLSEYTIDDLNEEYFSAPVKRMIWQTLLIIKEIEKIMKCPPTRIFVEMTRKDDEKGDNGRKSSRKDQLLALYKKIQSEDKEWKKEMSSRIEDYDKNGALRSKKLYLYFIQKGLDMYTGKPIDLDNLMSANSNYDIDHIYPRHFVKDDNINNNLVLASKPANAEKSDIYPIKDSIYQKMKYTWKVLRDEGLITEEKYKRLTGRNPFTDEQKAGFIARQLVETGQGTKGVADLLTALLPDTKLVYSKAGNVSDFRKRYDIPKSRLINDFHHAHDAYLNIVVGNIYFTKFTSNPLNYIRKECSSKDNKYQYNLGNMYKWDVKRDGKTAWVAPEEGETGTLATVKKMLSRNTPILTRLTIEGHGGIADATLYSHKKAKQDTYIPLKSSDARMADVTKYGGYSSVTTAYLFLVEHEIKGKKIRTLETVPLYLKDRLENSKEKLEEYCRETLGYTNPSVRMKKIKLQSLIKLNGYYMQISGKTNKQFTVRNYVQFCLNSKWVDYIHKLEKYQDKGVIDDAITDEKNVELYNVLCEKHSVGIFTLRPNPVGDKIKKGYDKFVNLTTEEQIKLLIEIIKLTCVGIVSANLTLIGGASISGKMLISKNITDAKECLLINQSVTGLYENRIDLLRV

SEQ ID NO: 3168 - protein, 1358 aa, Unknown
  Description of Unknown: uncultivated organism sequence
  Category: MG91 effectors
  Description: MG91-360 effector
MEKEYYLGLDMGTNSVGWAVTDDAYNLIRFKGKDMWGIREFDEANPAVERRTHRTSRRREQRNAVRMGLIRSYFADEIQKVDSNFYQRLDNSFFHVEDKQDNVKDKNGIFNDKNYKDADYYKQYPTIFHLRKELIEDASQKDVRLVYLAVANMFKHRGHFLLSGIGSESSKQTITDLYNQVSGLITEEYGISLKTDIAGTDFEQVLCSREYSRTRKSEKVCEILEIKNSDKLKKAFVKSMCGLSVKITDIIDDTFTEISDEDKKITFSFVDSDYDEKAGVLEEKLGTDVYDIISKLKEIHDKAQVAEIMKNYQYLSFARVADYEKHKKDLKILKRVVKKHFEPTVYDKLFRSEENGTYSAYVNSFNSEEKSRRNYKERKQEDLYNSIKKLLKSVDNVDDTDIEYIKNEMDKENFLPKQLTFKNGVIPNQIHASELKAILKNAEKYLPFLNEKDESGYTVSERILMLFSFQIPYYVGPVSSNSNGWVKRLESGQVLPWNIDKKIDLKETSEQFIQRMVRNCTYIAGEKVLPKASLLYENFKVLNEINNLSINGERIAVALKQDLYNTLFLKGKRVTRKQIFNYFHSRGLVEEDSQISGIDIAVNNSLSTYGKFLPLFGEHLKEDKYKKMVDDIVFWCTVYGDSRKFLREQLEEKYSDVLDENQIKRITGMKFKDWGNLSKEFLELSGCCKSTGEMIPLIRAMWETNYNLMELLHSEEFTYSEELEEKQGKIEKVLSEYTIDDLNEEYFSAPVKRMVWQTLLIIKEIEKIMKCPPTRIFVEMTRKDDEKGDNGRKSSRKDQLLALYKKIQSEDKEWKKEMSSRIEDYDKNGALRSKKLYLYFIQKGLDMYTGKPIDLDNLMSANSNYDIDHIYPRHFVKDDNINNNLVLASKPANAEKSDIYPIKDSIYQKMKYTWKVLRDEGLITEEKYKRLTGRNPFTDEQKAGFIARQLVETGQGTKGVADLLTALLPDTKLVYSKAGNVSDFRKKYDIPKSRLINDFHHAHDAYLNIVVGNIYFTKFTSNPLNYIRKECSSKDNKYQYNLGNMYKWDVKRDGKTAWIAAKEGETGTLATVKKMLSRNTPILTRLAIEGHGGIADATLYSHKKAKQDAYIPLKSSDARMADVTKYGGYSSVTTAYLFLVEHEIKGKKIRTLETVPLYLKDRLENSKEKLEEYCRETLGYTNPSVRMKKIKLQSLIKLNGYYMQISGKTNKQFTVRNYVQFCLNSKWVDYIHKLEKYQDKGVIDDAITDEKNVELYNVLCEKHSVGIFTLRPNPVGDKIKKGYDKFVNLTTEEQIKLLIEIIKLTCVGIVSANLTLIGGASISGKMLISKNITDAKECLLINQSVTGLYENRIDLLRV

SEQ ID NO: 3169 - protein, 1358 aa, Unknown
  Description of Unknown: uncultivated organism sequence
  Category: MG91 effectors
  Description: MG91-361 effector
MEKEYYLGLDMGTNSVGWAVTDDAYNLIRFKGKDMWGIREFDEANPAVERRTHRTSRRREQRNAVRMGLIRSYFADEIQKVDSNFYQRLDNSFFHVEDKQDNVKDKNGIFNDKNYKDADYYKQYPTIFHLRKELIEDAFQKDVRLVYLAVANMFKHRGHFLLSGIGSESSKQTITDLYNQVSGLITEEYGISLKTDIAGTDFEQVLCSREYSRTRKLEKVCEILEIKNSDKLKKAFVKSMCGLSVKITDVIDDTFTEISDEDKKITFSFVDSDYDEKAGVLEEKLGTDVYDIISKLKEIHDKAQVAEIMKNYQYLSFARVADYEKHKKDLKILKRVVKKYFEPTVYDKLFRSGENGTYSAYVNSFNSGEKSRRNYKERKQEDLYNSIKKLLKSIDNVCDTDIEYIKNEIEKENFLPKQLTFKNGVIPNQIHASELKAILKNAEKYLPFLNEKDESGYTVSERILMLFSFQIPYYVGPVSPNSNGWVKRLEPGQVLPWNIDKKIDLKETSEQFIQRMVRNCTYIAGEKVLPKASLLYENFKVLNEINNLSINGERIAVALKQDLYNTLFLKGKRVTRKQIFNYFHSRGLVEEDSQISGIDIAVNNSLSTYGKFLPLFGEHLKEDKYKKMVDDIVFWCTVYGDSRKFLREQLEEKYSDVLDENQIKRITGMKFKDWGNLSKEFLELLGCCKSTGEMIPLIRAMWETNYNLMELLHSEEFTYSEELEEKQGKIEKVLSEYTIDDLNEEYFSAPVKRMVWQTLLIIKEIEKIMKCPPTRIFVEMTRKDDEKGDNGRKSSRKDQLLALYKKIQSEDKEWKKEMSSRIEDYDKNGALRSKKLYLYFIQKGLDMYTGKPIDLDNLMSANSNYDIDHIYPRHFVKDDNINNNLVLASKPANAEKSDIYPIKDSIYQKMKYTWKVLRDEGLITEEKYKRLTGRNPFTDEQKAGFIARQLVETGQGTKGVADLLTALLPDTKLVYSKAGNVSDFRKRYDIPKSRLINDFHHAHDAYLNIVVGNIYFTKFTSNPLNYIRKECSSKDNKYQYNLGNMYKWDVKRDGKTAWIAAKEGETGTIATVKKILSRNTPTLTRLTIEGHGGIADATLYSHKKAKQDAYIPLKSSDARMADVTKYGGYSSVTTAYLFLVEHEIKGKKIRTLETVPLYLKDRLENSKEKLEEYCRESLGYTNPSVRMKKIKLQSLIKLNGYYMQISGKSIKQFEVRNYVQICLNGKWVDYIHKLEKYQDKGVIDNAITDEKNVELYNVLCEKHNVGIYTMRPNPVGDRIKNGYDKFVNLTTEEQIKLLIEIIKLTCVGIVSADLTLIGGAAISGKMLMSKNITDANECILINQSVTGLYENRIDLLRV

SEQ ID NO: 3170 - protein, 1358 aa, Unknown
  Description of Unknown: uncultivated organism sequence
  Category: MG91 effectors
  Description: MG91-362 effector
MEKEYYLGLDMGTNSVGWAVTDDAYNLIRFKGKDMWGIREFDEANPAVERRTHRTSRRREQRNAVRMGLIRSYFADEIQKVDSNFYQRLDNSFFYVEDKQDNVKDKNGIFNDKNYKDANYYKQYPTIFHLRKELIEDASQKDVRLVYLAVANMFKHRGHFLLSGIGSESSKQTITDLYNQVSGLITEEYGISLKTDIAGTDFEQVLCSREYSRTRKSEKVCEILEIKNSDKLKKAFVKSMCGLSVKITDIIDDTFTEISDEDKKITFSFVDSDYDEKAGVLEEKLGTDVYDIISKLKEIHDKAQVAEIMKNYQYLSFARVADYEKHKKDLKILKRVVKKYFEPTVYDKLFRSEENGTYSAYVNSFNSEEKSRRNYKERKQEDLYNSIKKLLKSVDNVDDTDIEYIKNEMDKENFLPKQLTFKNGVIPNQIHASELKAILKNAEKYLPFLNEKDESGYTVSERILMLFSFQIPYYVGPVSSNSNGWGKRLEPGQVLPWNIDKKIDLKETSEQFIQRMVRNCTYIAGEKVLPKASLLYENFKVLNEINNLSINGERITVNLKQDLYNTLFLKGKRVTRKQIFNYFHSRGLVEEDSQISGIDIAVNNSLSTYGKFLPLFGEHLKEDKYKKMVDDIVFWCTVYGDSRKFLREQLEEKYSDVLDENQIKRITGMKFKDWGNLSKEFLELSGCCKSTGEVMPLIRAMWETNYNLMELLHSEEFTYSEELEEKQGKIEKVLSEYTIDDLNEEYFSAPVKRMVWQTLLIIKEIEKIMKCPPTRIFVEMTRKDDEKGDNGRKSSRKDQLLALYKKIQSEDKEWKKEMSSRIEDYDKNGALRSKKLYLYFIQKGLDMYTGKPIDLDNLMSANSNYDIDHIYPRHFVKDDNINNNLVLASKPANAEKSDIYPIKDSIYQKMKYTWKVLRDEGLITEEKYKRLTGRNPFTDEQKAGFIARQLVETGQGTKGVADLLTALLPDTKLVYSKAGNVSDFRKRYDIPKSRLINDFHHAHDAYLNIVVGNIYFTKFTSNPLNYIRKECSSKDNKYQYNLGNMYKWDVKRDGKTAWVAPEEGETGTLATVKKMLSRNTPILTRLTIEGHGGIADATLYSHKKAKQDTYIPLKSSDARMADVTKYGGYSSVTTAYLFLVEHEIKGKKIRTLETVPLYLKDRLENSKEKLEEYCRETLGYTNPSVRMKKIKLQSLIKLNGYYMQISGKTNKQFTVRNYVQFCLNSKWVDYIHKLEKYQDKGVIDDAITDEKNVELYNVLCEKHSVGIFTLRPNPVGDKIKKGYDKFVNLTTEEQIKLLIEIIKLTCVGIVSANLTLIGGASISGKMLISKNITDAKECLLINQSVTGLYENRIDLLRV

SEQ ID NO: 3171 - protein, 1358 aa, Unknown
  Description of Unknown: uncultivated organism sequence
  Category: MG91 effectors
  Description: MG91-363 effector
MEKEYYLGLDMGTNSVGWAVTDDAYNLIRFKGKDMWGIREFDEANPAVERRTHRTSRRREQRNAVRMGLIRSYFADEIQKVDSNFYQRLDNSFFHVEDKQDNVKDKNGIFNDKNYKDADYYKQYPTIFHLRKELIEDASQKDVRLVYLAVANMFKHRGHFLLSGIGSESSKQTITDLYNQVSGLITEEYGISLKTDIAGTDFEQVLCSREYSRTRKSEKVCEILEIKNSDKLKKAFVKSMCGLSVKITDIIDDTFTEISDEDKKITFSFVDSDYDEKAGVLEEKLGTDVYDIISKLKEIHDKAQVAEIMKNYQYLSFARVADYEKHKKDLKILKRVVKKYFEPTVYDKLFRSEENGTYSAYVNSFNSEEKSRRNYKERKQEDLYNSIKKLLKSVDNVDDTDIEYIKNEMDKENFLPKQLTFKNGVIPNQIHASELKAILKNAEKYLPFLNEKDESGYTVSERILMLFSFQIPYYVGPVSPNSNGWVKRLEPGQVLPWNIDKKIDLKETSEQFIQRMVRNCTYIAGEKVLPKASLLYENFKVLNEINNLSISGERIAVALKQDLYNTLFLKGKRVTRKQIFNYFHSRGLVEEDSQISGIDIAVNNSLSTYGKFLPLFGDHLKEDKYKKMVDDIVFWCTVYDDSRKFLREQLEEKYSDVLDENQIKRITGMKFKDWGNLSKEFLELSGCCKSTGEVMPLIRAMWETNYNLMELLHSEEFTYSEELEEKQGKIEKVLSEYTIDDLNEEYFSAPVKRMVWQTLLIIKEIEKIMKCPPTRIFVEMTRKDDEKGDNGRKSSRKDQLLALYKKIQSEDKEWKKEMSSRIEDYDKNGALRSKKLYLYFIQKGLDMYTGKPIDLDNLMSANSNYDIDHIYPRHFVKDDNINNNLVLASKPANAEKSDIYPIKDSIYQKMKYTWKVLRDEGLITEEKYKRLTGRNPFTDEQKAGFIARQLVETGQGTKGVADLLTALLPDTKLVYSKAGNVSDFRKRYDIPKSRLINDFHHAHDAYLNIVVGNIYFTKFTSNPLNYIRKECSSKDNKYQYNLGNMYKWDVKRDGKTAWVAPKEGETGTLATVKKMLSRNTPILTRLAIEGHGGIVDATRYSHKKVKQDTYIPLKSSDARMADVTKYGGYSDVKIAYLFLVEHETKGKKIRTLETVPIYLKDRLENSKEKLEEYCRETLGYTNPSVRMKKIKLQSLIKLNGYYMQISGKTNKQFTVRNYVQFCLNSKWVDYIHKLEKYQDKGVIDDAITDEKNVELYNVLCEKHSVGIFTLRPNPVGDKIKKGYDKFVNLTTEEQIKLLIEIIKLTCVGIVSANLTLIGGASISGKMLISKNITDAKECLLINQSVTGLYENRIDLLRV

SEQ ID NO: 3172 - protein, 1358 aa, Unknown
  Description of Unknown: uncultivated organism sequence
  Category: MG91 effectors
  Description: MG91-364 effector
MEKEYYLGLDMGTNSVGWAVTDDAYNLIRFKGKDMWGIREFDEANPAVERRTHRTSRRREQRNAVRMGLIRSYFADEIQKVDSNFYQRLDNSFFHVEDKQDNVKDKNGIFNDKNYKDADYYKQYPTIFHLRKELIEDASQKDVRLVYLAVANMFKHRGHFLLSGIGSESSKQTITDLYNQVSGLITEEYGISLKTDIAGTDFEQVLCSREYSRTRKSEKVCEILEIKNSDKLKKAFVKSMCGLSVKITDVIDDTFTEISDEDKKITFSFVDSDYDEKAGVLEEKLGTDVYDIISKLKEIHDKAQVAEIMKNYQYLSFARVADYEKHKKDLKILKRVVKKYFEPTVYDKLFRSGENGTYSAYVNSFNSGEKSRRNYKERKQEDLYNSIKKLLKSIDNVCDTDIEYIKNEIEKENFLPKQLTFKNGVIPNQIHASELKAILKNAEKYLPFLNEKDESGYTVSERILMLFSFQIPYYVGPVSSNSNGWVKRLEPGQVLPWNIDKKIDLKETSEQFIQRMVRNCTYIAGEKVLPKASLLYENFKVLNEINNLSINGERIAVALKQDLYNTLFLKGKRVTRKQIFNYFHSRGLVEEDSQISGIDIAVNNSLSTYGKFLPLFGEHLKEDKYKKMVDDIVFWCTVYGDSRKFLREQLEEKYSDVLDENQIKRITGMKFKDWGNLSKEFLELLGCCKSTGEMIPLIRAMWETNYNLMELLHSEEFTYSEELEEKQGKIEKVLSEYTIDDLNEEYFSAHVKRMVWQTLLIIKEIEKIMKCPPTRIFVEMTRKDDEKGDNGRKSSRKDQLLALYKKIQSEDKEWKKEMSSRIEDYDKNGALRSKKLYLYFIQKGLDMYTGKPIDLDNLMSANSNYDIDHIYPRHFVKDDNINNNLVLASKPANAEKSDIYPIKDSIYQKMKYTWKVLRDEGLITEEKYKRLTGRNPFTDEQKAGFIARQLVETGQGTKGVADLLTALLPDTKLVYSKAGNVSDFRKRYDIHKSRLINDFHHAHDAYLNIVVGNIYFTKFTSNPLNYIRKECSSKDNKYQYNLGNMYKWDVKRDGKTAWIAAKEGETGTIATVKKILSRNTPTLTRLTIEGHGGIADATLYSHKKAKQDAYIPLKSSDARMADVTKYGGYSSVTTAYLFLVEHEIKGKKIRTLETVPLYLKDRLENSKEKLEEYCRETLGYTNPSVRMKKIKLQSLIKLNGYYMQISGRTGNRFTLRNYVQLCLNGKWVDYIHKLEKYQDKGFIDNVITDEKNVELYNVLCEKHNVGIYTMRPNPVGDRIKNGYDKFVNLTTEEQIKLLIEIIKLTCVGIVSADLTLIGGAAISGKMLMSKNITDANECILINQSVTGLYENRIDLLRV

SEQ ID NO: 3173 - protein, 1358 aa, Unknown
  Description of Unknown: uncultivated organism sequence
  Category: MG91 effectors
  Description: MG91-365 effector
MEKEYYLGLDMGTNSVGWAVTDDAYNLIRFKGKDMWGIREFDEANPAVERRTHRTSRRREQRNAVRMGLIRSYFADEIQKVDSNFYQRLDNSFFHVEDKQDNVKDKNGIFNDKNYKDADYYKQYPTIFHLRKELIEDASQKDVRLVYLAVANMFKHRGHFLLSGIGSESSKQTITDLYNQVSGLITEEYGISLKTDIAGTDFEQVLCSREYSRTRKSEKVCEILEIKNSDKLKKAFVKSMCGLSVKITDVIDDTFTEISDEDKKITFSFVDSDYDEKAGVLEEKLGTDVYDIISKLKEIHDKAQVAEIMKNYQYLSFARVADYEKHKKDLKILKRVVKKYFEPTVYDKLFRSGENGTYSAYVNSFNSGEKSRRNYKERKQEDLYNSIKKLLKSIDNVCDTDIEYIKNEIEKENFLPKQLTFKNGVIPNQIHASELKAILKNAEKYLPFLNEKDESGYTVSERILMLFSFQIPYYVGPVSSNSNGWVKRLEPGQVLPWNIDKKIDLKETSEQFIQRMVRNCTYIAGEKVLPKASLLYENFKVLNEINNLSINGERIAVALKQDLYNTLFLKGKRVTRKQIFNYFHSRGLVEEDSQISGIDIAVNNSLSTYGKFLPLFGEHLKEDKYKKMVDDIVFWCTVYGDSRKFLREQLEEKYSDVLDENQIKRITGMKFKDWGNLSKEFLELLGCCKSTGEMIPLIRAMWETNYNLMELLHSEEFTYSEELEEKQGKIEKVLSEYTIDDLNEEYFSAHVKRMVWQTLLIIKEIEKIMKCPPTRIFVEMTRKDDEKGDNGRKSSRKDQLLALYKKIQSEDKEWKKEMSSRIEDYDKNGALRSKKLYLYFIQKGLDMYTGKPIDLDNLMSANSNYDIDHIYPRHFVKDDNINNNLVLASKTANAEKSDIYPIKDSIYQKMKYTWKVLRDEGLITEEKYKRLTGRNPFTDEQKAGFIARQLVETGQGTKGVADLLTALLPDTKLVYSKAGNVSDFRKRYDIPKSRLINDFHHAHDAYLNIVVGNIYFTKFTSNPLNYIRKECSSKDNKYQYNLGNMYKWDVKRDGKTAWIAAKEGETGTLATVKKMLSRNTPILTRLAIEGHGGIADATLYSHKKAKQDAYIPLKSSDARMADVTKYGGYSSVTTAYLFLVEHEIKGKKIRTLETVPLYLKDRLENSKEKLEEYCRETLGYTNPSVRMKKIKLQSLIKLNGYYMQISGKTNKQFTVRNYVQFCLNSKWVDYIHKLEKYQDKGFIDNVITDEKNVELYNVLCEKHNVGIYTMRPNPVGDKIKKGYDKFVNLTTEEQIKLLIEIIKLTCVGIVSANLTLIGGAAISGKMLISKNITDAKECLLINQSVTGLYENRIDLLRV

SEQ ID NO: 3174 - protein, 1352 aa, Unknown
  Description of Unknown: uncultivated organism sequence
  Category: MG91 effectors
  Description: MG91-366 effector
MTAFKYYLGLDMGTNSVGWAATDPEYRLLKAKGKDLWGIREFNEASGAVERRTHRISRRRRQREQVRIGILKDYFHDAICEVDPSFFQRLENSKYHEEDKDVEVRYKNNIFNDSNYTDKDYFNEYPTIYHLRNELISSTEKHDVRLVFLALLNMFKHRGHFLNAGLGENNGESNIDNAYFELTELLSELTEYHLSQDIDCKQIEAILSRRDMSRTHKAEELAGVLHVDLKNKPYKELIRGLCGLKFNACVVFPDVQSEEVTKLDICLSESTFDEKSDEIANIIGEDYFEIIMAMKEMFDIGSLASIMKGHNYLSQARVASYTKHKEDLKLLKEVIKKYCGKKEYDKFFNSDADGSYASYVGSYNSKNKERRVGNKRTSEELYKEIKKLLKDAQKEDENVQKILTSIENETFLPKQLTASNGVIPNQVHAREMKKILSNAENYLPFLTEKDETGLSVSERILKLFTFQIPYYVGPTSENSGKNGGNGWVVRREDGQVLPWNIDEKIDMKATSEAFISRMVRRCTYISGEQVLPKASLEYQSYCVLNEINNIKIDGERISVELKQDIYKAVFQKGKKVTKKQLCKYLHTRGIIETEEQVTGVDVSINNALTTYGKFKPIFGEDISKDSVQKMIEDIVFWCTVYGDSKKFLKDRIEEKYGNKLSEEQIKRILGFKFKDWGNLSKKFLELNGADTSTGESISIIRALWNNNLNLMELINSSLYNYKECLAEYQNTMLKTLSEIEAEDLNEYYFSAPVRRMIWQTILVIKELVKVLGCEPERIFVEMTRKPDEHKTRTSSRRNKFEELYKKVKDETTDWMQVIANAEEDGKIRSKKMYLYLTQKGRCMYTGKHIELDDLFDNNLYDIDHIYPRHFVKDDNIDNNLVLVCKEKNAHKSDHYPIEEEIFLSQKKMWLELRKSGFITEEKYNRLMDRNPFSDEQKAGFIARQLVETSQGTKGVANILRQLLPSSKIVYAKASNVSEFRCTRDDIQKSRLVNDFHHAHDAYLNIVVGNVYYVKFTQNPLNFIKKDYDKYKEDYNLSKMFDWDVKRNGEVAWIAQRKDGAAGTITTVKRMLSRNTPLMTRYSFDGKGGLTNETLYSAKKAKGEGYIPFKSSDDKMQDVTKYGGFTSVTGAYFFLVEHTEKKKRIRTIESVPVYLAQKIEQNPDELKKYCEEILGLIDADIRLKKIKIGSLIKRNGYFCYITGKTVNRLIVRNAVNLCLKNEWIKYISKLEKVKEKDAVDKIITKEKNEVLYSELIQKFKHGIFSKRPNPVGDKLEKDSEKFNNLSIKDQCAVLCQVLRMAAILGSECDMTLLGDSPNCGKMLISKKIGDEEIYLINQSVTGLYEKKINLHTV

SEQ ID NO: 3175 - protein, 1353 aa, Unknown
  Description of Unknown: uncultivated organism sequence
  Category: MG91 effectors
  Description: MG91-367 effector
MEKDYYLGLDMGTDSVGWAVTDENYNLIRAKGKDLWGVREFESAKPAADRRSYRISRRRRQREQVRLGMLKSIFADAIKEKDPLFFIRLENSKYWKDDKNSKINTKNVLFDDPGYTDADYFKEFPTIFHLRLKLMNDDSGRYLSDPRFVYLACLQLFKHRGHFLSDISDETDPSDLSSTYERFKSLYCELTGYEFTEKDVAADDIMNVLSDRNLSRTAKKEKLIDVFSFSKSDSSKTECLKSICGLESDACKIFPDLKTEDIKKLSFNFSKSDYEEKSAELNESVGDEYFELISILKDIYDKGTLADILKGKKYLSEARVEDYNKHKKDLVLLKSVYRKYKTQDEYNEMFRDPTKGYGAYIGSNFTKDKKTSRRGSKSRDVFYDYLKKSLKGLEEDPDVKTIFDDIAKENFLVKQLTSSNGVIPNQVHLKELKKILSNAENYLPFLKETDESGLSASQRIISIFSFTIPYYVGPVSELSEKNGGNGWVVRKEDGKVYPWNFEDKINISETKRRFIDRLINECTYISGEKVLPKQSLIYQKFAMLNELNSVRINGERLDVEFKQKAFKELFSKGKQVTLNEFKNYLNNNGINIDEKSEISGVGKSSEMTRFNNKLSSYQVFHSVFGDKLEDKKYYDAAENIIYLGTIYADDKKTFKKAIEEKYGDFLTPDEIKRVSGLKFKDWGTLSAALFNLQGAEKSTGEVMTLIDALWNTQLNFMELINSDAFSYKEELEKYKKKGEGTIQNFKFEELNDYYFSAPVKRMIWQTVLIVREIEHVLGKPPVKMFVEVTRHDEEKEKIPPSRKDTFLSLYKNIKDESHDWKAIIEKADESGVIRSQKMYLYLSQMGRDLYTGKEIELDELFTTKYDIDHIIPQSLKKDDSILNNKVLTSKDFNNNIKQDNPLCEAIDDAHYAERKKLWDRLHNYNLINDEKYKRLTNRKGFSEEDLEGFIARQIVETSQAVLGVINIFKEIMPDTKIVFSKAKPVSDFRKNEIGWLKSRTLNDYHHAHDAYLNIVVGNVYNTKFTDNPRNFIKKERQKDLNPNYHMNKVFWYNVERGGKVAWIAGEDGTKKTVLKTLAKNSELMTRQSFEQTGGLCNQQITNKDDAGSGIGYLPVKMGEDISKYGGYAKISQSYFFLVEHTFKKKRIRTIETVPAYLKSQIESDPDALKRYCAEKLGLVDPDIRLRRINYQSLAKYNGFYVTICSKTGVRFNIANAVRLTLPKEWNNYIKKLEKTEGDEEITEEKNIELYDILTDKHLNSIFLKRPNPVGENLKNGREKFVSLSKKEQVSTLNNILLFTGFASAGKADISSIGGSKNAGFMKISKNVTNADEFVLIENSVTGIYSVRKDLKTI

SEQ ID NO: 3176 - protein, 1352 aa, Unknown
  Description of Unknown: uncultivated organism sequence
  Category: MG91 effectors
  Description: MG91-368 effector
MQEKPYYLGLDMGTNSVGWAVTDQHYNLLKAKGKDLWGIREFIEADTSVERRTHRISRRRRQREQARIGLLNDYFHDAIIAIDPSFFQRLENSKYHLEDKDQNVRYKYNIFNDPDYTDADYYTQYPTIYHLRKELLENPKPHDVRLVYLALLNMFKHRGHFLNSGISDGNNERSLKDAYINFAISVSELTEDYFNQDVDYSTIEGILSSRDLNRTKKAEELSTVLGIDFKNKKYKEYLRAICGLKINAYTLFSDQLPDDTTKIDLCVSDASFDEKSEELVSLIGEDLFQIILNIKEIYDIGSLAGILKGYTYLSQARVAAYDKHKHDLKLLKSSIKKYCTKEEYNNFFNSDADGSYASYIGSFNSGNKERRVGSKRTSEDLYKEIKKLLKGANKSDPAINEIFTSIETESFLPKQLTASNGIIPNQVHSKEMARILTNAENYLPFLKETDENNLSISNRILQLYKFQIPYYIGPVTEKSQRDGGNGWVIRKDNGRVFPWNIEEKIDVKATSEAFISRMVRRCTYMNGKQVLPKASLEYESFRVLNEINNLRIDGERIPVTLKQDIYTDLFQKGKKVTKKQLCNYLATRGLIESSEQVTGIDIAINNSLSTYGKFKAIFGEDIKLDHIQHMIEDIVFWCTVYGDSKQFLKEQIEDKYKGKLSPEQMKRILGFKFKDWGNLSKEFFELKGADKSTGEAVSIIRALWENNLNLMELINSSEFDFKEQLADYEANSLKTLSDFEPEDLNDYYFSAPVRRMIWQTTLIIKELVHVLGKEPARIFIEMTREKDASRGRTLSRKKKFEDLYKNVKDENTDWAKVIEHADESGTIRSKKMYLYLTQKGRCMYTGNHIELSDLFNDNLYDIDHIYPRHFVKDDNIDNNLVLVTKEKNAHKSDTYPLEAEIFNKQRNMWTQLRKEGFISEEKYNRLMGRNAFTDEQKAGFIARQLVETSQGTKGVAELFHQLLPNSKIVYAKAGNVSDFRRNRELPKSRLVNDFHHAHDAYLNIVVGNVYYVKFTQNPINYIKNSYNKDMNKNNYNLSRMFDWDVKRGDEVAWIAQKQDGAAGTISTVKKMLSKNTPLMTRLSYEGKGALANETLYSAEKAKGEGYIPFKSSDTKIQDVTKYGGFTSVTGAYFFLVEHDEKKKRIRTIESVPLYLADKIDKDSSELERYCDKLGLVNYDVRVRKIKIGSLIKYNGYFCYITGKTGYRLIVRNATNLCLTSNWRKYIKKIEKYKETTIIDNVITAEENIKLYNELLNKFTVGIFGRRPNPIGEKMDSARDKFASLSIENQCLALYQILQLTAILGNESDLQLIGASTHAGKMLISKKIGTDEIYLINQSPTGLFETKIDLQTI

SEQ ID NO: 3177 - protein, 1353 aa, Unknown
  Description of Unknown: uncultivated organism sequence
  Category: MG91 effectors
  Description: MG91-369 effector
MEQKTYYLGLDMGTNSVGWAVTDENYNLLRAKGKDLWGIREFESASGAIERRAHRVSRRNRQRQQVRVGKLNCYFEDAINEVDPNFYARLRNSKYHLEDKEEAVRTPNGIFNDPAYKDKDYYAQYPTIYHLRKELLTNDEPHDVRLVYLALLNMFKHRGHFLNAALTSEGTRHMQDAYNSFQENVYEMCDLSFPDVDGKEIEAVLSNRDLNRSRKSEALMELFHFTKKENKTELEFVKGMCGLTTEASKLFGDLGLEEKVEICFSKASYEDRIPDIMDAVGEENFRVLENLKEIADIGTLAGVLKGYTYLSEARVAEYEKHKSDLKLLKSVIRQYGTQEDYNKMFRSEESGTYSAYVNSYNSGKKQRRDMKGRTREDFYKSLKKLLKGMPEEDENVAQILAEIDKEKFLPKQLTASNGVIPNQVHLKEMKAILRNAEQYLPFLKEVDESGLTTSERIWRLFSFQIPYYVGPVTPNSSRDGGNGWVVRKEEGEVLPWNINEKIDLPATQDAFIKRLVRECTYISGEKVLPKGALIYEKFAVLNEINNIRIDNERLDTPLKQAIYNDLFCTGKRITRKKILDYLSAQGKLKNESQLTGIDKNINNSLSSYGKFLGVFGEDLKKDHYIDMSEDIIYWCTVYGDSKKVLRSLLEEKYQGELTEKQMKRILGFKFGDWGRMSREFLELEGIDKETGEVVTLIHAMWDNSMNMMELIHSDRFTFAESLESKKTKMDKTLSEFKHEDLDEYYFSAPVKRMIWQTLLVIKELEKVLGGPPTRLFVEMTRSDDVKGDKGRKKSRKDELLELYKKVKDESHDWTAIINAADENGTIRSKKMYLYLTQRGRCMYTGKPIDLNQLFDNNIYDIDHIYPRHFVKDDNLRNNLVLVDKRANARKSDNYPIDSNIRCNDSIKALWYSLKKEKLISEEKYRRLTGSNPFSDEQKAGFIARQMVETSQATKGVNDLLKQLLPETELVYSKASNVSDFRRDYDLLKSRTINDFHHANDAYLNIVVGNVFLVKFTNNPRNFIKEYNRDKYTYGYNLGRIFERDVKRGDQVAWIADDRNGNHGTIETVKKMMAKHTPLLTRMNFVNNGQISKGTLYSKFKAKPDTYIPLKETDEKMRDISKYGGFTNVSTAYFFLVEHGKANKRIRTIEAVPIYMKSRLENNEEELKKYCVEQLGLLDPSIRLNKIKIQSQFRINGFYVFFRGKTGHELLWGNNTSLCLEPKWNNYISYLDKYAKNGYMNRFITKEENEHLYSELLKKHSEAIFSKRPNSFSKIVIAGQEKFKDLDIEKQCVALSQLISATSIGSSIADVTMIGGTAQTGRMRTNKKISGYELVLINTSATGLYKTEIDLNKI

SEQ ID NO: 3178 - protein, 1123 aa, Unknown
  Description of Unknown: uncultivated organism sequence
  Category: MG91 effectors
  Description: MG91-370 effector
MSKKILSLDLGITSIGYSVLDEMQNDRYRLLDYGVSMFDKATDKDGNSKKLLHSINSSTANLYALRKKRKQNLASLFEAFGLGEKTTLLQQEKNNLYKNKWQLRAKKAFEEKLEVGELFTIFYALAKHRGYKSLESGDLLEELCEKLGIEVQSASKQKKDDDEKGKIKKALKTIENFRVENPEKTVAQIIYEAEIKKENPTFRNHDNYNYMIRREYINDEIGKIIKMQENFGFFECSFDVDLFITKLIATIDDQKDSTNDLNFFGNCQYYDDEKAAHQYSLLSDIFKMYESVANITFNAKPVVKITKEQIQLITDDFFKKIVKGKNVTEIKYKDIRKILQLSDDMKIFNKEDSRIIKGKKSDNTIIKFHFLNNLSKINNNFITKALEQENKYEILKEIFDVLAYEKAPHTIFENLKNKIEDEQTIIDLIRYKSGNSMNISHYAMMQFIPYFEEGFTTDAIKEKLGLDRQEDYSKFKKGIKYLHVNNFEKDDKLEINNHPVKSVVSATMRVVKHLHATHGAFDEIRVESTRELSQNEETKKEIEKANKALQKEIDTIVNNKEYQEIAKSYGKNLKKYARKILMYLAQEGRDIYSGKGIEIADIFTNSVDLDHIVPKSLGGLSVKHNLVLAHRNTNVQKSNQLPLNFVADKQAFINRVEYLFSEHKINWKKRKNLLATNLDETFQDIFESKSLRATSYIEALTAQMLKRYYPFANEKKRVDGSAVRHIQGRATSNIRKLLHVKIKVRDTNIHHAIDAILIGLTNQSWLQKLSNTFRENMGIIDDEARAKIKKEIPLIEGIEPQELIEMIEDRYNVFGEESVFYKDIWGKTKVINFWISKKPMVSKIHKDTIYAKKPNGFYTVRESIINKFGGLKITPKTSSEEFIKIFKKNILHKMYLYKTNPKDTMCQIIQKRGEAIATLLDSFTDFDSKNKEQMSEAKMALDSLIHSDLVDNNGNIVRKVKFYQTNLTGFDVRGGLATKEKTFIGFQSWLENEKLHYKRIDVANFKKIKKQNDGNFQVFKNDIVFFVYPNGSFRGGKIVSFLEENKTGAFQNSKFPMSLKYQPEIFCELNKEKKHVKTKPRSIGKSTGIIKLNLDIIGNIKSYTCIGKIESEILDFIKASVNG

SEQ ID NO: 3179 - protein, 1342 aa, Unknown
  Description of Unknown: uncultivated organism sequence
  Category: MG91 effectors
  Description: MG91-371 effector
MRYFMGLDMGTSSVGWAVTDEHYQLLRRKGKDMWGIREFEEAATAVERRTHRVSRRRRQRQVARIGLLQEYFHDAIHQVDPNFYQRLKNSKYHEEDKDEIVRESNGIFNDAEYTDKEYFKEFPTIFHLRQELIKSKEPHDVRLVYLALLNMFKHRGHFLNATLSADGESRKIKDIYTDFVDKAAEQLGVSFATDIRYEKLENYLSSNDLSRKRKGELIAELLHVTRKDKQQYALIECMLGLDKSVKLMFGDTLPEDFDKTIKVNFSDIAFEEKATEISEAIGEEKYDLILIMKEIYDAAILNRIMNGYTYLSDARVAEYEKHKSDLACLKHYIKEYGTQHQFDFLFRGTEKGSYSAYVHSVNSHEKQRRNMDGNKKEDLYSTLKKILKDMPENEEKTYIMMQIELDNFLPKQLTASNGVIPNQIHLKEMKKILANAENYLPFLKEKDESGYTVSERIQKLFAFQIPYYIGPTTEKSAEFGGNGWVVRKEEGKVLPWNIDQKIDMKKTSEEFISRMVRRCTYMNDEQVLPKESLEYESFCVLNELNNIKVYGEKLPVDIKQDIYRTLCEKGKRITKKSLMKYLVGRGVIKAEDEAQLTGLMDGLNNTLKSFAKFKAIFGDAIYEDSCKKMVEQIIFWCTVYGDSKHFLKEQLLEKYGEVLTDAQIKRILGIKFRDWGNLSKKFLELQGCSKETGEVNSLIRMLWETNDNLMELLAQDSYTFKEELENMQESTYKVLTELQLEDLDHMYFSAPVKRMIWQTILIIKEVTKVMGCQPERLFIEMTREHGQKNDIKDSRAKKFYELYSKIKDEDKDWRKVIEDADKDGKIRSKKMYLYLTQMGRCMYTGRPIDLDQLFNNNLYDIDHIYPRHYVKDDNLENNMVLVEKQSNAHKSDVYPLESGIYEKQVNWWRELHRKNLINDEKLKRLTGRNPFTDEQKAGFIARQLVETSQGTKGVATILQEALPDTTLVYAKARNVSDFRKDNDLLKSRIVNDFHHAHDAYLNIVIGNVYYVKFTKNPINFIREHGTYNLGKMFAKDVKRGDDIGWVAQSGNGQTATMETIKRTMARNTPLLTRMSYEVTGGLANQTLYSASKAKEGTYIPLKSSDERMQDVTKYGGFTSVSTAYFMLVEHDGKKGKRIRTIESVPIMWKERIEKNPAELERYCLEVLKLSNPDIRVRKILIQSLIKRNGYYMQITGKTGNRMYVRNMVSLCLVQDWVNYIKKLEKDKDENISKEKNIRLYDVLMDKHINTIYNTRPNPVGDLLIKRRSDFIELKITDQVIILLEILKLTQTALGSANLKLIGEAEKTGVMLISKDITALDEMLLINQSVTGLYEQRVNLLTV

SEQ ID NO: 3180 - protein, 1358 aa, Unknown
  Description of Unknown: uncultivated organism sequence
  Category: MG91 effectors
  Description: MG91-372 effector
MEKEYYLGLDMGTNSVGWAVTDDAYNLIRFKGKDMWGIREFDEANPAVERRTHRTSRRRKQRNAVRMGLIRSYFADEIQKVDSNFYQRLDNSFFHVEDKQDNVKDKNGIFNDKNYKDADYYKQYPTIFHLRKELIEDASQKDVRLVYLAVANMFKHRGHFLLSGIGSESSKQTITDLYNQVSGLITEEYGISLKTDIAGTDFEQVLCSREYSRTRKSEKVCEILEIKNSDKLKKAFVKSMCGLSVKITDIIDDTFTEISDEDKKITFSFVDSDYDEKAGVLEEKLGTDVYDIISKLKEIHDKAQVAEIMKNYQYLSFARVADYEKHKKDLKILKRVVKKYFEPTVYDKLFRSEENGTYSAYVNSFNSEEKSRRNYKERKQEDLYNSIKKLLKSVDNVDDTDIEYIKNEMDKENFLPKQLTFKNGVIPNQIHASELKAILKNAEKYLPFLNEKDESGYTVSERILMLFSFQIPYYVGPVSPNSNGWVKRLEPGQVLPWNIDKKIDLKETSEQFIQRMVRNCTYIAGEKVLPKASLLYENFKVLNEINNLSISGERIAVALKQDLYNTLFLKGKRVTRKQIFNYFHSRGLVEEDSQISGIDIAVNNSLSTYGKFLPLFGDHLKEDKYKKMVDDIVFWCTVYGDSRKFLREQLEEKYSDVLDENQIKRITGMKFKDWGNLSKEFLELSGCCKSTGEMMPLIRAMWETNYNLMELLHSEEFTYSEELEEKQGKIEKVLSEYTIDDLNEEYFSAPVKRMVWQTLLIIKEIEKIMKCPPTRIFVEMTRKDDEKGDNGRKSSRKDQLLALYKKIQSEDKEWKKEMSSRIEDYDKNGALRSKKLYLYFIQKGLDMYTGKPIDLDNLMSANSNYDIDHIYPRHFVKDDNINNNLVLASKPANAEKSDIYPIKDSIYQKMKYTWKVLRDEGLITEEKYKRLTGRNPFTDEQKAGFIARQLVETGQGTKGVADLLTALLPDTKLVYSKAGNVSDFRKKYDIPKSRLINDFHHAHDAYLNIVVGNIYFTKFTSNPLNYIRKECSSKDNKYQYNLGNMYKWDVKRDGKTAWIAAKEGETGTIATVKKMLSRNTPTLTRLTIEGPGGIADATLYSHKKAKQDAYIPLKSSDARMADVTKYGGYSSVTTAYLFLVEHEIKGKKIRTLETVPLYLKDRLENSKEKLEEYCGETLGYTNPSVRMKKIKLQSLIKLNGYYMQISGKTNKQFTVRNYVQFCLNSKWVDYIHKLEKYQDKGVIDDAITDEKNVELYNVLCEKHSVGIFTLRPNPVGDKIKKGYDKFVNLTTEEQIKLLIEIIKLTCVGIVSANLTLIGGASISGKMLISKNITDAKECLLINQSVTGLYENRIDLLRV

SEQ ID NO: 3181 - protein, 1352 aa, Unknown
  Description of Unknown: uncultivated organism sequence
  Category: MG91 effectors
  Description: MG91-373 effector
MTAFKYYLGLDMGTNSVGWAATDPGYRLLKAKGKDLWGIREFNEASGAVERRTHRISRRRRQREQVRIGILKDYFHDAICEVDPGFFQRLENSKYHEEDKDVEVRYKNNIFNDSNYTDKDYFNEYPTIYHLRNELISSTEKHDVRLVFLALLNMFKHRGHFLNAGLGENNGESNIDNAYFELTELLSELTEYHLSQDIDCKQIEAILSRRDMSRTHKAEELAGVLHVDLKNKPYKELIRGLCGLKFNACVVFPDVQSEEVTKLDICLSESSFDEKSDEIANIIGEDYFEIIMAMKEMFDIGSLASIMKGHNYLSQARVASYTKHKEDLKLLKEVIKKYCGKKEYDKFFNSDADGSYASYVGSYNSKNKERRVGNKRTSEELYKEIKKLLQDAPKEDENVQKILTSIENETFLPKQLTASNGVIPNQVHAREMKKILSNAENYLPFLTEKDETGLSVSERILKLFTFQIPYYVGPTSENSGKNGGNGWVVRREDGQVLPWNIDEKIDMKATSEAFISRMVRRCTYISGEQVLPKASLEYQSYCVLNEINNIKIDGERISVELKQDIYKAVFQKGKKVTKKQLCKYLHTRGIIETEEQVTGVDVSINNALTTYGKFKPIFGEDISKDSVQKMIEDIVFWCTVYGDSKKFLKDRIEEKYGNKLSEEQIKRILGFKFKDWGNLSKKFLELNGADTSTGESISIIRALWNNNLNLMELINSSLYNYKECLAEYQNTMLKTLSEIEAEDLNEYYFSAPVRRIIWQTILVIKELVKVLGCEPERIFVEMTRKPDEHKTRTSSRRNKFEELYKKVKDEATDWMQVIAKAEEDGKIRSKKMYLYLTQKGRCMYTGKHIELDDLFDKNLYDIDHIYPRHFVKDDNIDNNLVLVCKEKNAHKSDHYPIEEEIFLSQKKMWLELRKSGFITEEKYNRLMGRSPFSDEQKAGFIARQLVETSQGTKGVANILRQLLPGSKIVYAKASNVSEFRHTRDDIPKSRLVNDFHHAHDAYLNIVVGNVYYVKFTQNPLNFIKKDYDKYKEDYNLSKMFDWDVKRNGEVAWIAQRKDGEAGTITTVKRMLSRNTPLMTRYSFEGKGGLENETLCSAKKAKGEGYIPFKSSDDKMQDVTKYGGFTKVTGAYFFLVEHTEKKKRIRTIESVPVYLAQKIEQNPDELKKYCEEILGLVDADIRLKKIKIGSLIKRNGYFCYITGKTGNRLSVRNAVNLCLKNEWIKYISKLEKVKEKDAVDEIITKEKNEVLYSELIQKFKHGIFSKRPNPVEDKLEKGSEKFSNLSIKEQCAVLCQILQLAAVLGSECDMTLLGESAHCGKMLISKKIGDEEIYLLNQSVTGLYEKKINLHTV

SEQ ID NO: 3182 - protein, 1352 aa, Unknown
  Description of Unknown: uncultivated organism sequence
  Category: MG91 effectors
  Description: MG91-374 effector
MTAFKYYLGLDMGTNSVGWAATDPGYRLLKAKGKDLWGIREFNEASGAVERRTHRISRRRRQREQVRIGILKDYFHDAICEVDPGFFQRLENSKYHEEDKDVEVRYKNNIFNDGNYTDKDYFNEYPTIYHLRNELISSTEKHDVRLVFLALLNMFKHRGHFLNAGLGENNGESNIDNAYFELTELLSELTEYHLSQDIDCKQIEAILSRRDMSRTHKAEELAGVLHVDLKNKPYKELIRGLCGLKFNACVVFPDVQSEEVTKLDICLSESTFDEKSDEIANIIGEDYFEIIMAMKEMFDIGSLASIMKGHNYLSQARVASYTKHKEDLKLLKEVIKKYCSKKEYDKFFNSDADGSYASYVGSYNSKNKERRVGNKRTSEELYKEIKKLLKDAQKEDENVQKILTSIENETFLPKQLTASNGVIPNQVHAREMKKILSNAENYLPFLTEKDETGLSVSERILKLFTFQIPYYVGPTSENSGKNGGNGWVVRREDGQVLPWNIDEKIDMKATSEAFISRMVRRCTYISGEQVLPKASLEYQSYCVLNEINNIKIDGERISVELKQDIYKAVFQKGKKVTKKQLCKYLHTRGIIETEEQVTGVDVSINNALTTYGKFKPIFGEDISKDSVQKMIEDIVFWCTVYGDSKKFLKDRIEEKYGNKLSEEQIKRILGFKFKDWGNLSKKFLELNGADTSTGESISIIRALWNNNLNLMELINSSLYNYKECLAEYQNTMLKTLSEIEAEDLNEYYFSAPVRRMIWQTILVIKELVKVLGCEPERIFVEMTRKPDEHKTRTSSRRNKFEELYKKVKDETTDWMQVIANAEEDGKIRSKKMYLYLTQKGRCMYTGKHIELDDLFDNNLYDIDHIYPRHFVKDDNIDNNLVLVCKEKNAHKSDHYPIEEEIFLSQKKMWLELRKSGFITEEKYNRLMDRNPFSDEQKAGFIARQLVETSQGTKGVANILRQLLPGSKIVYAKASNVSEFRCTRDDIQKSRLVNDFHHAHDAYLNIVVGNVYYVKFTQNPLNFIKKDYDKYKEDYNLSKMFDWDVKRNGEVAWIAQRKDGAAGTITTVKRMLSRNTPLMTRYSFDGKGGLTNETLYSAKKAKGEGYIPFKSSDDKMQDVTKYGGFTSVTGAYFFLVEHTEKKKRIRTIESVPVYLAQKIEQNPDELKKYCEEILGLIDADIRLKKIKIGSLIKRNGYFCYITGKTGNRLIVRNAVNLCLKNEWIKYISKLEKVKEKDAVDKIITKEKNEVLYSELIQKFKHGIFSKRPNPVGDKLEKDSEKFNNLSIKDQCAVLCQVLRMAAILGSECDMTLLGDSPNCGKMLISKKIGDEEIYLINQSVTGLYEKKINLHTV

SEQ ID NO: 3183 - protein, 1358 aa, Unknown
  Description of Unknown: uncultivated organism sequence
  Category: MG91 effectors
  Description: MG91-375 effector
MEKEYYLGLDMGTNSVGWAVTDDAYNLIRFKGKDMWGIREFDEANPAVERRTHRTSRRREQRNAVRMGLIRSYFADEIQKVDSNFYQRLDNSFFHVEDKQDNVKDKNGIFNDKNYKDADYYKQYPTIFHLRKELIEDASQKDVRLVYLAVANMFKHRGHFLLSGIGSESSKQTITDLYNQVSGLITEEYGISLKTDIAGTDFEQVLCSREYSRTRKSEKVCEILEIKNSDKLKKAFVKSMCGLSVKITDIIDDTFTEISDEDKKITFSFVDSDYDEKAGVLEEKLGTDVYDIISKLKEIHDKAQVAEIMKNYQYLSFARVADYEKHKKDLKILKRVVKKHFEPTVYDKLFRSEENGTYSAYVNSFNSEEKSRRNYKERKQEDLYNSIKKLLKSVDNVDDTDIEYIKNEMDKENFLPKQLTFKNGVIPNQIHASELKAILKNAEKYLPFLNEKDESGYTVSERILMLFSFQIPYYVGPVSSNSNGWVKRLESGQVLPWNIDKKIDLKETSEQFIQRMVRNCTYIAGEKVLPKASLLYENFKVLNEINNLSINGERIAVALKQDLYNTLFLKGKRVTRKQIFNYFHSRGLVEEDSQISGIDIAVNNSLSTYGKFLPLFGEHLKEDKYKKMVDDIVFWCTVYGDSRKFLREQLEEKYSDVLDENQIKRITGMKFKDWGNLSKEFLELLGCCKSTGEMIPLIRAMWETNYNLMELLHSEEFTYSEELEEKQGKIEKVLSEYTIDDLNEEYFSAPVKRMVWQTLLIIKEIEKIMKCPPTRIFVEMTRKDDEKGDNGRKSSRKDQLLALYKKIQSEDKEWKKEMSSRIEDYDKNGALRSKKLYLYFIQKGLDMYTGKPIDLDNLMSANSNYDIDHIYPRHFVKDDNINNNLVLASKPANAEKSDIYPIKDSIYQKMKYTWKVLRDEGLITEEKYKRLTGRNPFTDEQKAGFIARQLVETGQGTKGVADLLTALLPDTKLVYSKAGNVSDFRKRYDIPKSRLINDFHHAHDAYLNIVVGNIYFTKFTSNPLNYIRKECSSKDNKYQYNLGNMYKWDVKRDGKTAWIAAKEGETGTLATVKKMLSRNTPILTRLAIEGHGGIADATLYSHKKAKQDAYIPLKSSDARMADVTKYGGYSSVTTAYLFLVEHEIKGKKIRTLETVPLYLKDRLENSKEKLEEYCRETLGYTNPSVRMKKIKLQSLIKLNGYYMQISGKTNKQFTVRNYVQFCLNSKWVDYIHKLEKYQDKGVIDDAITDEKNVELYNVLCEKHSVGIFTLRPNPVGDKIKKGYDKFVNLTTEEQIKLLIEIIKLTCVGIVSANLTLIGGASISGKMLISKNITDAKECLLINQSVTGLYENRIDLLRV

SEQ ID NO: 3184 - protein, 1358 aa, Unknown
  Description of Unknown: uncultivated organism sequence
  Category: MG91 effectors
  Description: MG91-376 effector
MEKEYYLGLDMGTNSVGWAVTDDAYNLIRFKGKDMWGIREFDEANPAVERRTHRTSRRREQRNAVRMGLIRSYFADEIQKVDSNFYQRLDNSFFHVEDKQDNVKDKNGIFNDKNYKDADYYKQYPTIFHLRKELIEDASQKDVRLVYLAVANMFKHRGHFLLSGIGSESSKQTITDLYNQVSGLITEEYGISLKTDIAGTDFEQVLCSREYSRTRKSEKVCEILEIKNSDKLKKAFVKSMCGLSVKITDIIDDTFTEISDEDKKITFSFVDSDYDEKAGVLEEKLGTDVYDIISKLKEIHDKAQVAEIMKNYQYLSFARVADYEKHKKDLKILKRVVKKYFEPTVYDKLFRSEENGTYSAYVNSFNSEEKSRRNYKERKQEDLYNSIKKLLKSVDNVDDTDIEYIKNEMDKENFLPKQLTFKNGVIPNQIHASELKAILKNAEKYLPFLNEKDESGYTVSERILMLFSFQIPYYVGPVSSNSNGWVKRLEPGQVLPWNIDKKIDLKETSEQFIQRMVRNCTYIAGEKVLPKASLLYENFKVLNEINNLSINGERITVNLKQDLYNTLFLKGKRVTRKQIFNYFHSRGLVEEDSQISGIDIAVNNSLSTYGKFLPLFGEHLKEDKYKKMVDDIVFWCTVYGDSRKFLREQLEEKYSDVLDENQIKRITGMKFKDWGNLSKEFLELSGCCKSTGEVMPLIRAMWETNYNLMELLHSEEFTYSEELEEKQGKIEKVLSEYTIDDLNEEYFSAPVKRMVWQTLLIIKEIEKIMKCPPTRIFVEMTRKDDEKGDNGRKSSRKDQLLALYKKIQSEDKEWKKEMSSRIEDYDKNGALRSKKLYLYFIQKGLDMYTGKPIDLDNLMSANSNYDIDHIYPRHFVKDDNINNNLVLASKPANAEKSDIYPIKDSIYQKMKYTWKVLRDEGLITEEKYKRLTGRNPFTDEQKAGFIARQLVETGQGTKGVADLLTALLPDTKLVYSKAGNVSDFRKRYDIPKSRLINDFHHAHDAYLNIVVGNIYFTKFTSNPLNYIRKECSSKDNKYQYNLGNMYKWDVKRDGKTAWVAPEEGETGTLATVKKMLSRNTPILTRLTIEGHGGIADATLYSHKKAKQDTYIPLKSSDARMADVTKYGGYSSVTTAYLFLVEHEIKGKKIRTLETVPIYLKDRLENSKEKLEEYCRETLGYTNPSVRMKKIKLQSLIKLNGYYMQISGRTGNRFTLRNYVQLCLNGKWVDYIHKLEKYQDKGVIDDLITDERNVELYNVLCEKHSVGIFTLRPNLVGDKIKNGYDKFVNLTTEEQIKLLIEIIKLTCVGIVSANLTLIGGAAISGKMLMSKNITYANECILINQSVTGLYENRIDLLGV

SEQ ID NO: 3185 - protein, 1358 aa, Unknown
  Description of Unknown: uncultivated organism sequence
  Category: MG91 effectors
  Description: MG91-377 effector
MEKEYYLGLDMGTNSVGWAVTDDAYNLIRFKGKDMWGIREFDEANPAVERRTHRTSRRREQRNAVRMGLIRSYFADEIQKVDSNFYQRLDNSFFHVEDKQDNVKDKNGIFNDKNYKDADYYKQYPTIFHLRKELIEDASQKDVRLVYLAVANMFKHRGHFLLSGIGSESSKQTITDLYNQVSGLITEEYGISLKTDIAGTDFEQVLCSREYSRTRKSEKVCEILEIKNSDKLKKAFVKSMCGLSVKITDIIDDTFTEISDEDKKITFSFVDSDYDEKAGVLEEKLGTDVYDIISKLKEIHDKAQVAEIMKNYQYLSFARVADYEKHKKDLKILKRVVKKYFEPTVYDKLFRSEENGTYSAYVNSFNSEEKSRRNYKERKQEDLYNSIKKLLKSVDNVDDTDIEYIKNEMDKENFLPKQLTFKNGVIPNQIHASELKAILKNAEKYLPFLNEKDESGYTVSERILMLFSFQIPYYVGPVSSNSNGWVKRLEPGQVLPWNIDKKIDLKETSEQFIQRMVRNCTYIAGEKVLPKDSLLYENFKVLNEINNLSINGERITVNLKQDLYNTLFLKGKRVTRKQIFNYFHSRGLVEEDSQISGIDIAVNNSLSTYGKFLPLFGEHLKEDKYKKMVDDIVFWCTVYGDSRKFLREQLEEKYSDVLDENQIKRITGMKFKDWGNLSKEFLELSGCCKSTGEVMPLIRAMWETNYNLMELLHSEEFTYSEELEEKQGKIEKVLSEYTIDDLNEEYFSAPVKRMVWQTLLIIKEIEKIMKCPPTRIFVEMTRKDDEKGDNGRKSSRKDQLLALYKKIQSEDKEWKKEMSSRIEDYDKKGALRSKKLYLYFIQKGLDMYTGKPIDLDNLMSANSNYDIDHIYPRHFVKDDNINNNLVLASKPANAEKSDIYPIKDSIYQKMKYTWKVLRDEGLITEEKYKRLTGRNPFTDEQKAGFIARQLVETGQGTKGVADLLTALLPDTKLVYSKAGNVSDFRKKYDIPKSRLINDFHHAHDAYLNIVVGNIYFTKFTSNPLNYIRKECSSKDNKYQYNLGNMYKWDVKRDGKTAWIAAKEGETGTIATVKKMLSRNTPTLTRLTIEGHGGIADATLYSHKKAKQDAYIPLKSSDARMADVTKYGGYSSVTTAYLFLVEHEIKGKKIRTLETVPLYLKDILENSKEKLEEYCRETLGYTNPSVRMKKIKLQSLIKLNGYYMQISGKTNKQFTVRNYVQFCLNSKWVDYIHKLEKYQDKGVIDDAITDEKNVELYNVLCEKHSVGIFTLRPNPVGDKIKKGYDKFVNLTTEEQIKLLIEIIKLTCVGIVSANLTLIGGASISGKMLISKNITDAKECLLINQSVTGLYENRIDLLRV

SEQ ID NO: 3186 - protein, 1358 aa, Unknown
  Description of Unknown: uncultivated organism sequence
  Category: MG91 effectors
  Description: MG91-378 effector
MEKEYYLGLDMGTNSVGWAVTDDAYNLIRFKGKDMWGIREFDEANPAVERRTHRTSRRREQRNAVRMGLIRSYFADEIQKVDSNFYQRLDNSFFHVEDKQDNVKDKNGIFNDKNYKDADYYKQYPTIFHLRKELIEDASQKDVRLVYLAVANMFKHRGHFLLSGIGSESSKQTITDLYNQVSGLITEEYGISLKTDIAGTDFEQVLCSREYSRTRKSEKVCEILEIKNSDKLKKAFVKSMCGLSVKITDIIDDTFTEISDEDKKITFSFVDSDYDEKAGVLEEKLGTDVYDIISKLKEIHDKAQVAEIMKNYQYLSFARVADYEKHKKDLKILKRVVKKYFEPTVYDKLFRSEENGTYSAYVNSFNSEEKSRRNYKERKQEDLYNSIKKLLKSVDNVDDTDIEYIKNEMDKENFLPKQLTFKNGVIPNQIHASELKAILKNAEKYLPFLNEKDESGYTVSERILMLFSFQIPYYVGPVSSNSNGWVKRLEPGQVLPWNIDKKIDLKETSEQFIQRMVRNCTYIAGEKVLPKASLLYENFKVLNEINNLSINGERITVNLKQDLYNTLFLKGKRVTRKQIFNYFHSRGLVEEDSQISGIDIAVNNSLSTYGKFLPLFGEHLKEDKYKKMVDDIVFWCTVYGDSRKFLREQLEEKYSDVLDENQIKRITGMKFKDWGNLSKEFLELSGCCKSTGEMIPLIRAMWETNYNLMELLHSEEFTYSEELEEKQGKIEKVLSEYTIDDLNEEYFSAPVKRMVWQTLLIIKEIEKIMKCHPTRIFIEMTRKDDEKGDNGRKSSRKDQLLALYKKIQSEDKEWKKEMSSRIEDYDKNGALRSKKLYLYFIQKGLDMYTGKPIDLDNLMSANSNYDIDHIYPRHFVKDDNINNNLVLASKPANAEKSDIYPIKDSIYQKMKYTWKVLRDEGLITEEKYKRLTGRNPFTDEQKAGFIARQLVETGQGTKGVADLLTALLFDTKLVYSKAGNVSDFRKRYDIPKSRLINDFHHAHDAYLNIVVGNIYFTKFTSNPLNYIRKECSSKDNKYQYNLGNMYKWDVKRDGKTAWIAAKEGETGTIATVKKMLSRNTPTLTRLTIEGHGGIADATLYSHKKAKQDAYIPLKSSDARMADVTKYGGYSSVTTAYLFLVEHEIKGKKIRTLETVPLYLKDRLENSKEKLEEYCRETLGYTNPSVRMKKIKLQSLIKLNGYYMQISGKTNKQFTVRNYVQFCLNSKWVDYIHKLEKYQDKGVIDDAITDEKNVELYNVLCEKHSVGIFTLRPNPVGDKIKKGYDKFVNLTTEEQIKLLIEIIKLTCVGIVSANLTLIGGASISGKMLISKNITDAKECLLINQSVTGLYENRIDLLRV

SEQ ID NO: 3187 - protein, 1358 aa, Unknown
  Description of Unknown: uncultivated organism sequence
  Category: MG91 effectors
  Description: MG91-379 effector
MEKEYYLGLDMGTNSVGWAVTDDAYNLIRFKGKDMWGIREFDEANPAVERRTHRTSRRREQRNAVRMGLIRSYFADEIQKVDSNFYQRLDNSFFHVEDKQDIVKDKNGIFNDKNYKDADYYKQYPTIFHLRKELIEDASQKDVRLVYLAVANMFKHRGHFLLSGIGSESSKQTITDLYNQVSGLITEEYGISLKTDIAGTDFEQVLCSREYSRTRKSEKVCEILEIKNSDKLKKAFVKSMCGLSVKITDVIDDTFTEISDEDKKITFSFVDSDYDEKAGVLEEKLGTDVYDIISKLKEIHDKAQVAEIMKNYQYLSFARVADYEKHKKDLKILKRVVKKYFEPTVYDKLFRSGENGTYSAYVNSFNSGEKSRRNYKERKQEDLYNSIKKLLKYIDNVCDTDIEYIKNEIEKENFLPKQLTFKNGVIPNQIHASELKAILKNAEKYLPFLNEKDESGYTVSERILMLFSFQIPYYVGPVSPNSNGWVKRLEPGQVLPWNIDKKIDLKETSEQFIQRMVRNCTYIAGEKVLPKASLLYENFKVLNEINNLSINGERIAVALKQDLYNTLFLKGKRVTRKQIFNYFHSRGLVEEDSQISGIDIAVNNSLSTYGKFLPLFGEHLKEDKYKKMVDDIVFWCTVYGDSRKFLREQLEEKYSDVLDENQIKRITGMKFKDWGNLSKEFFELLGCCKSTGEMIPLIRAMWETNYNLMELLHSEEFTYSEELEEKQGKIEKVLSEYTIDDLNEEYFSAPVKRMVWQTLLIIKEIEKIMKCPPTRIFVEMTRKDDEKGDNGRKSSRKDQLLALYKKIQSEDKEWKKEMSSRIEDYDKNGALRSKKLYLYFIQKGLDMYTGKPIDLDNLMSANSNYDIDHIYPRHFVKDDNINNNLVLASKPANAEKSDIYPIKDSIYQKMKYTWKVLRDEGLITEEKYKRLTGRNPFTDEQKAGFIARQLVETGQGTKGVADLLTALLPDTKLVYSKAGNASDFRKKYDIPKSRLINDFHHAHDAYLNIVVGNIYFTKFTSNPLNYIRKECSSKDNKYQYNLGNMYKWDVKRDGKTAWIAAKEGETGTLATVKKMLSRNTPILTRLAIEGHGGIADATLYSHKKAKQDAYIPLKSSDARMADVTKYGGYSSVTTAYLFLVEHEIKGKKIRTLETVPLYLKDRLENSKEKLEEYCRETLGYTNPSVRMKKIKLQSLIKLNGYYMQISGKTNKQFTVRNYVQFCLNSKWVDYIHKLEKYQDKGVIDDAITDEKNVELYNVLCEKHSVGIFTLRPNPVGDKIKKGYDKFVNLTTEEQIKLLIEIIKLTCVGIVSANLTLIGGAAISGKMLISKNITDAKECLLINQSVTGLYENRIDLLRV

SEQ ID NO: 3188 - protein, 1352 aa, Unknown
  Description of Unknown: uncultivated organism sequence
  Category: MG91 effectors
  Description: MG91-380 effector
MTAFKYYLGLDMGTNSVGWAATDPGYRLLKAKGKDLWGIREFNEASGAVERRTHRISRRRRQREQVRIGILKDYFHDAICEVDPGFFRRLENSKYHEEDKDVEVRYKNNIFNDSNYTDKDYFNEYPTIYHLRNELISSTEKHDVRLVFLALLNMFKHRGHFLNAGLGENNGESNIDNVYFELTELLSELTEYHLSQDIDCKQIEAILSRRDMSRTHKAEELAGVLHVDLKNKPYKELIRGLCGLKFNACVVFPDVQSEEVTKLDICLSESTFDEKSDEIANIIGEDYFEIIMAMKEMFDIGSLASIMKGHNYLSQARVASYTKHKEDLKLLKEVIKKYCGKKEYDKFFNSDADGSYASYVGSYNSKNKERRVGNKRTSEELYKEIKKLLKDAQKEDENVQKILTSIENETFLPKQLTASNGVIPNQVHAREMKKILSNAENYLPFLTEKDETGLSVSERILKLFTFQIPYYVGPTSENSGKNGGNGWVVRREDGQVLPWNIDEKIDMKATSEAFISRMVRRCTYISGEQVLPKASLEYQSYCVLNEINNIKIDGERISVELKQDIYKAVFQKGKKVTKKQLCKYLHTRGIIETEEQVTGVDVSINNALTTYGKFKPIFGEDISKDSVQKMIEDIVFWCTVYGDSKKFLKDRIEEKYGNKLSEEQIKRILGFKFKDWGNLSKKFLELNGADTSTGESISIIRALWNNNLNLMELINSSLYNYKECLAEYQNTMLKTLSEIEAEDLNEYYFSAPVRRIIWQTILVIKELVKVLGCEPERIFVEMTRKPDEHKTRTSSRRNKFEELYKKVKDEATDWMQVIAKAEEDGKIRSKKMYLYLTQKGRCMYTGKHIELDDLFDKNLYDIDHIYPRHFVKDDNIDNNLVLVCKEKNAHKSDHYPIEEEIFLSQKKMWLELRKSGFITEEKYNRLMGRSPFSDEQKAGFIARQLVETSQGTKGVANILRQLLPGSKIVYAKASNVSEFRHTRDDIPKSRLVNDFHHAHDAYLNIVVGNVYYVKFTQNPLNFIKKDYDKYKEDYNLSKMFDWDVKRNGEVAWIAQRKDGEAGTITTVKRMLSRNTPLMTRYSFEGKGGLANETLCSAKKAKGEGYIPFKSSDDKMQDVTKYGGFTKVTGAYFFLVEHTEKKKRIRTIESVPVYLAQKIEQNPDELKKYCEEILGLVDADIRLKKIKIGSLIKRNGYFCYITGKTGNRLSVRNAVNLCLKNEWIKYISKLEKVKEKDAVDEIITKEKNEVLYSELIQKFKHGIFSKRPNPVEDKLEKGSEKFSNLSIKEQCAVLCQILQLAAVLGSECDMTLLGESAHCGKMLISKKIGDEEIYLLNQSVTGLYEKKINLHTV

SEQ ID NO: 3189 - protein, 1358 aa, Unknown
  Description of Unknown: uncultivated organism sequence
  Category: MG91 effectors
  Description: MG91-381 effector
MEKEYYLGLDMGTNSVGWAVTDDAYNLIRFKGKDMWGIREFDEANPAVERRTHRTSRRREQRNAVRMGLIRSYFADEIQKVDSNFYQRLDNSFFHVEDKQDNVKDKNGIFNDKNYKDADYYKQYPTIFHLRKELIEDASQKDVRLVYLAVANMFKHRGHFLLSGIGSESSKQTITDLYNQVSGLITEEYGISLKTDIAGTDFEQVLCSREYSRTRKSEKVCEILEIKNSDKLKKAFVKSMCGLSVKITDIIDDTFTEISDEDKKITFSFVDSDYDEKAGVLEEKLGTDVYDIISKLKEIHDKAQVAEIMKNYQYLSFARVADYEKHKKDLKILKRVVKKYFEPTVYDKLFRSEENGTYSAYVNSFNSEEKSRRNYKERKQEDLYNSIKKLLKSVDNVDDTDIEYIKNEMDKENFLPKQLTFKNGVIPNQIHASELKAILKNAEKYLPFLNEKDESGYTVSERILMLFSFQIPYYVGPVSSNSNGWVKRLESGQVLPWNIDKKIDLKETSEQFIQRMVRNCTYIAGEKVLPKASLLYENFKVLNEINNLSINGERITVNLKQDLYNTLFLKGKRVTRKQIFNYFHSRGLVEEDSQISGIDIAVNNSLSTYGKFLPLFGEHLKEDKYKKMVDDIVFWCTVYGDSRKFLREQLEEKYSDVLDENQVKRITGMKFKDWGNLSKEFLELSGCCKSTGEMIPLIRAMWETNYNLMELLHSEEFTYSEELEEKQGKIEKVLSEYTIDDLNEEYFSAPVKRMVWQTLLIIKEIEKIMKCHPTRIFIEMTRKDDEKGDNGRKSSRKDQLLALYKKIQSEDKEWKKEMSSRIEDYDKNGALRSKKLYLYFIQKGLDMYTGKPIDLDNLMSANSNYDIDHIYPRHFVKDDNINNNLVLASKPANAEKSDIYPIKDSIYQKMKYTWKVLRDEGLITEEKYKRLTGRNPFTDEQKAGFIARQLVETGQGTKGVADLLTALLPDTKLVYSKAGNVSDFRKRYDIPKSRLINDFHHAHDAYLNIVVGNIYFTKFTSNPLNYIRKECSSKDNKYQYNLGNMYKWDVKRDGKTAWIAAKEGETGTIATVKKMLSRNTPTLTRLTIEGHGGIADATLYSHKKAKQDAYIPLKSSDARMADVTKYGGYSSVTTAYLFLVEHEIKGKKIRTLETVPLYLKDRLENSKEKLEEYCRETLGYTNPSVRMKKIKLQSLIKLNGYYMQISGKSIKQFEVRNYVQICLNGKWVDYIHKLEKYQDKGVIDNAITDEKNVELYNILCEKHSVGIFTLRPNPVGDKIKKGYDKFVNLTTEEQIKLLIEIIKLTCVGIVKADLRLIGASEKSGTMKINKNITDAKECFLINQSVTGLYENRIDLLRV

SEQ ID NO: 3190 - protein, 1022 aa, Unknown
  Description of Unknown: uncultivated organism sequence
  Category: MG91 effectors
  Description: MG91-382 effector
MKSSIKKYCTKEEYNNFFNSDADGSYASYIGSFNSGNKERRVGSKRTSEDLYKEIKKLLKGANKSDPAINEIFTSIETESFLPKQLTASNGIIPNQVHSKEMARILTNAENYLPFLKETDENNLSISNRILQLYKFQIPYYIGPVTEKSQRDGGNGWVIRKDNGRVFPWNIEEKIDVKATSEAFISRMVRRCTYMNGKQVLPKASLEYESFRVLNEINNLRIDGERIPVTLKQDIYTDLFQKGKKVTKKQLCNYLATRGLIESSEQVTGIDIAINNSLSTYGKFKAIFGEDIKLDHIQHMIDDIVFWCTVYGDSKQFLKEQIEDKYKGKLSPEQMKRILGFKFKDWGNLSKEFFELKGADKSTGEAVSIIRALWENNLNLMELINSPEFDFKEQLADYEANSLKTLSDFEPEDLNDYYFSAPVRRMIWQTTLIIKELVHVLGKEPARIFIEMTREKDASRGRTLSRKKKFEDLYKNVKDENTDWAKVIEHADESGTIRSKKMYLYLTQKGRCMYTGNHIELSDLFNDNLYDIDHIYPRHFVKDDNIDNNLVLVTKEKNAHKSDNYPLEAEIFNKQRNMWTQLRKEGFISEEKYNRLMGRNAFTDEQKAGFIARQLVETSQGTKGVAELFHQLLPNSKIVYAKAGNVSDFRRNREFPKSRLVNDFHHAHDAYLNIVVGNVYYVKFTQNPINYIKNSYNKDMNKNNYNLSRMFDWDVKRGDEVAWIAQKQDGAAGTISTVKKMLSKNTPLMTRLSYEGKGALANETLYSAEKAKGEGYIPFKSSDTKIQDVTKYGGFTSVTGAYFFLVEHDEKKKRIRTIESVPLYLADKIDKDSSELERYCDKLGLVNYDVRVRKIKIGSLIKYNGYFCYITGKTGYRLIVRNATNLCLASNWRKYIKKIEKYKETTIIDNVITAEENIKLYNELLNKFTVGIFGRRPNPIGEKMDSARDKFASLSIENQCLALYQILQLTAILGNESDLQLIGASTHAGKMLISKKIGTDEIYLINQSPTGLFETKIDLQTI

SEQ ID NO: 3191 - protein, 1342 aa, Unknown
  Description of Unknown: uncultivated organism sequence
  Category: MG91 effectors
  Description: MG91-383 effector
MRYFMGLDMGTSSVGWAVTDEHYQLLRRKGKDMWGIREFEEAATAVERRTHRVSRRRRQRQVARIGLLQEYFHDAIHQVDPNFYQRLKNSKYHEEDKDEIVRESNGIFNDAEYTDKEYFKEFPTIFHLRQELIKSKEPHDVRLVYLALLNMFKHRGHFLNATLSADGESRKIKDIYTDFVDKAAEQLGVSFATDIRYEELENYLSSNDLSRKRKGELIAELLHVTRKDKQQYALIECMLGLDKSVKLMFGDTLPEDFDKTIKVNFSDIAFEEKATEISEAIGEEKYDLILIMKEIYDAAILNRIMNGYTYLSDARVAEYEKHKSDLACLKHYIKEYGTQQQFDFLFRGTEKGSYSAYVHSVNSHEKQRRNMAGNKKEDLYSALKKMLKDMPENEEKTCIMMQIELDNFLPKQLTASNGVIPNQIHLKEMKKILANAENYLPFLKEKDESGYTVSERIQKLFAFQIPYYIGPTTEKSAEFGGNGWVVRKEEGKVLPWNIDQKIDMKKTSEKFISRMVRRCTYMNDEQVLPKESLEYESFCVLNELNNIKVYGEKLPVDIKQDIYRTLCEKGKRVTKKSLMQYLVGRGVIKAEDEEQLTGLMDGLNNTLKSFAKFKAIFGDAIYEDSCKKMVEQIIFWCTVYGDSKHFLKEQLLEKYGEVLTGAQIKRILGIKFRDWGNLSKKFLELQGCSKETGEVNSLIRMLWETNDNLMELLAQDSYTFKEELENMQESTYKVLTELQPEDLDHMYFSAPVKRMIWQTILIIKEVTKVMGCQPERLFIEMTREHGQKNDIKDSRAKKFYELYSKIKDEDKDWRKVIEDADKDGRIRSKKMYLYLTQMGRCMYTGRPIDLDQLFNNNLYDIDHIYPRHYVKDDNLENNMVLVEKQSNAHKSDVYPLESGIYEKQVNWWRELHRKNLINDEKLKRLTGRNPFTDEQKAGFIARQLVETSQGTKGVATILQEALPDTTLVYAKARNVSEFRSDNDLLKSRIVNDFHHAHDAYLNIVIGNVYYVKFTKNPINFIREHGTYNLGKMFAKDVKRGDDIGWVAQSGNGQTATMETIKRTMARNTPLLTRMSYEVTGGLANQTLYSASKAKEGTYIPLKSSDERMQDVTKYGGFTSVSTAYFMLVEHDGKKGKRIRTIESVPIMWKERIEKNPAELERYCLDVLKLSNPDIRVRKILIQSLIKRNGYYMQITGKTGNRMYVRNMVSLCLVQDWVNYIKKLEKDKDENISKEKNIRLYDVLMDKHINTIYNTRPNPVGDLLIKRRSDFIELKITDQVIILLEILKLTQTALGSANLKLIGEAEKTGVMLISKDITALDEMLLINQSVTGLYEQRVNLLTV

SEQ ID NO: 3192 - protein, 1299 aa, Unknown
  Description of Unknown: uncultivated organism sequence
  Category: MG91 effectors
  Description: MG91-384 effector
MTAFKYYLGLDMGTNSVGWAATDPEYRLLKAKGKDLWGIREFNEASGAVERRTHRISRRRRQREQVRIGILKDYFHDAICEVDPSFFRRLENSKYHEEDKDVEVRYKNNIFNDGNYTDKDYFNEYPTIYHLRNELISSTEKHDVRLVFLALLNMFKHRGHFLNAGLGENNGESNIDNAYFELTELLSELTEYHLSQDIDCKQIEAILSRRDMSRTHKAEELAGVLHVDLKNKPYKELIRGLCGLKFNACVVFPDVQSEEVTKLDICLSESSFDEKSDEIANIIGEDYFEIIMAMKEMFDIGSLASIMKGHNYLSQARVASYTKHKEDLKLLKEVIKKYCGKKEYDKFFNSDADGSYASYVGSYNSKNKERRVGNKRTSEELYKEIKKLLKDAPKEDENVQKILTSIENETFLPKQLTASNGVIPNQVHAREMKKILSNAENYLPFLTEKDETGLSVSERILKLFTFQIPYYVGPTSENSGKNGGNGWVVRREDGQVLPWNIDEKIDMKATSEAFISRMVRRCTYISGEQVLPKASLEYQSYCVLNEINNIKIDGERISVELKQDIYKAVFQKGKKVTKKQLCKYLHTRGIIETEEQVTGVDVSINNALTTYGKFKPIFGEDISKDSVQKMIEDIVFWCTVYGDSKKFLKDRIEEKYGNKLSEEQIKRILGFKFKDWGNLSKKFLELNGADTSTGESISIIRALWNNNLNLMELINSSLYNYKECLAEYQNTMLKTLSEIEAEDLNEYYFSAPVRRMIWQTILVIKELVKVLGCEPERIFVEMTRRPDEHKTRTSSRRNKFEELYKKVKDEATDWMQVIAKAEEDGKIRSKKMYLYLTQKGRCMYTGKHIELDDLFDKNLYDIDHIYPRHFVKDDNIDNNLVLVCKEKNAHKSDHYPIEEEIFLSQKKMWLELRKSGFITEEKYNRLMGRSPFSDEQKAGFIARQLVETSQGTKGVANILRQLLPGSKIVYAKASNVSEFRHTRDDIPKSRLVNDFHHAHDAYLNIVVGNVYYVKFTQNPLNFIKKDYDKYKEDYNLSKMFDWDVKRNGEVAWIAQRKDGEAGTITTVKRMLSRNTPLMTRYSFEGKGGLANETLCSAKKAKGEGYIPFKSSDDKMQDVTKYGGFTSVTGAYFFLVEHTEKKKRIRTIESVPVYLAQKIEQNPDELKKYCEEILGLIDADIRLKKIKIGSLIKRNGYFCYITGKTGNRLIVRNAVNLCLKNEWIKYISKLEKVKEKDAVDKIITKEKNEVLYSELIQKFKHGIFSKRPNPVGDKLEKDSEKFNNLSIKDQCAVLCQVLRI

SEQ ID NO: 3193 - protein, 1352 aa, Unknown
  Description of Unknown: uncultivated organism sequence
  Category: MG91 effectors
  Description: MG91-385 effector
MTAFKYYLGLDMGTNSVGWAATDPGYRLLKAKGKDLWGIREFNEASGAVERRTHRISRRRRQREQVRIGILKDYFHDAICEVDPGFFQRLENSKYHEEDKDVEVRYKNNIFNDSNYTDKDYFNEYPTIYHLRNELISSTEKHDVRLVFLALLNMFKHRGHFLNAGLGENNGESNIDNAYFELTELLSELTEYHLSQDIDCKQIEAILSRRDMSRTHKAEELAGVLHVDLKNKPYKELIRGLCGLKFNACVVFPDVQSEEVTKLDICLSESTFDEKSDEIANIIGEDYFEIIMAMKEMFDIGSLASIMKGHNYLSQARVASYTKHKEDLKLLKEVIKKYCSKKEYDKFFNSDADGSYASYVGSYNSKNKERRVGNKRTSEELYKEIKKLLKDAQKEDENVQKILTSIENETFLPKQLTASNGVIPNQVHAREMKKILSNAENYLPFLTEKDETGLSVSERILKLFTFQIPYYVGPTSENSGKNGGNGWVVRREDGQVLPWNIDEKIDMKATSEAFISRMVRRCTYISGEQVLPKASLEYQSYCVLNEINNIKIDGERISVELKQDIYKAVFQKGKKVTKKQLCKYLHTRGIIETEEQVTGVDVSINNALTTYGKFKPIFGEDISKDSVQKMIEDIVFWCTVYGDSKKFLKDRIEEKYGNKLSEEQIKRILGFKFKDWGNLSKKFLELNGADTSTGESISIISALWNNNLNLMELINSSLYNYKECLAEYQNTMLKTLSEIEAEDLNEYYFSAPVRRMIWQTILVIKELVKVLGCEPERIFVEMTRKPDEHKTRTSSRRNKFEELYKKVKDETTDWMQVIANAEEDGKIRSKKMYLYLTQKGRCMYTGKHIELDDLFDNNLYDIDHIYPRHFVKDDNIDNNLVLVCKEKNAHKSDHYPIEEEIFLSQKKMWLELRKSGFITEEKYNRLMDRNPFSDEQKAGFIARQLVETSQGTKGVANILRQLLPGSKIVYAKASNVSEFRCTRDDIQKSRLVNDFHHAHDAYLNIVVGNVYYVKFTQNPLNFIKKDYDKYKEDYNLSKMFDWDVKRNGEVAWIAQRKDGAAGTITTVKRMLSRNTPLMTRYSFDGKGGLTNETLYSAKKAKGEGYIPFKSSDDKMQDVTKYGGFTSVTGAYFFLVEHTEKKKRIRTIESVPVYLAQKIEQNPDELKKYCEEILGLIDADIRLKKIKIGSLIKRNGYFCYITGKTGNRLIVRNAVNLCLKNEWIKYISKLEKVKEKDAVDKIITKEKNEVLYSELIQKFKHGIFSKRPNPVGDKLEKDSEKFNNLSIKDQCAVLCQVLRMAAILGSECDMTLLGDSPNCGKMLISKKIGDEEIYLINQSVTGLYEKKINLHTV

SEQ ID NO: 3194 - protein, 1138 aa, Unknown
  Description of Unknown: uncultivated organism sequence
  Category: MG91 effectors
  Description: MG91-386 effector
MVKYKIENLERKMSKKILSLDLGITSVGYSVLEELEKDKYSLIDYGVSMFDKPIDKDGKSKKLLHSSIKSTTKLYNLRKQRVKKLAHLFEKYNLGLATELLNQEKENRYPNKWRLRAKKVFEQKLTVGELFTILYLIAKHRGYKSLDSDDLLEELLLELGFEIEEKKSKKDDEKGKIKKALKTIEELIVKNPHKTVAQIIYEEEIIKDNPTFRNHDNYNYMIRRQHIKEEIEKIVVAQYEFGLFENDFEVKSFIKELIESIDDQKDSSNDLSLFGNCQYYPEFKVAHQYSLLSDIFKMYESVSNITLNKTKITKEQIEMVANWFFKKIEQGKNFSEIKYQDIRVVLKLSDEVKIFGKEDYYLDKKGKRVHHTITKFHFLSSLGKIDNGFIKVLFQKANSLEILDEIFDILKTEKSPKTIYSKLTDTFLRYDLIEDKKIRDETVINLIKNKSGKSLNISAYAMRKFIPYFKDGLSTDEIKEKLNLNRDENYANFKKWIKYLHIKNYEKDDNLEINNHPVKYVVSATIRVIKHLHSTYGVFDEIRVESTRELSQNEETKKAIEKANKENEKKFKEILENKEYQKIASDYGKNLKKYARKIILWEEQDKLDIYSGKVIDFDDIFSNRVDIDHIIPQSLGGLSVKHNLVLAHRDENVKKSNQLPMNFIKNKDDFVKRVEYLFSEHKINWKKRKNLLATTLDEAYQDTFESKSLRATSYIEALTAQMLKRYYPFPSKNKQRDGSAVRHIQGRATSNIRKLLGIKSKVRNTNIHHAIDAILIGLTNHSWLQKLSNTFRENIGVIDDEARAKIKKQIPIIEGIEPKELVELIESVYNIYGEESIFYKDIFGNTKSINFWVSKKPMSSKIHKDTIYAKKPNGIFTVREDIIKQFVGLKVTVKTEPKKFIESFEKKIANKIYVCKINPKDIICQIIKERAKEIELLLKSFVTLNHKDKEQISQAKEKLDTLIHKPLIDNNGNIIRKVKFYQTNLTGFDIRGGLAVTEKTFIGFKAIKGDKKIEYKRVDASNFQKIKKENDGSFKVYKNDIVFFIFSDATYKGGRVVSFLEDKKIVAFSNPRFAPNAKSQPISFVTIFKGEPYSHKQHSINKAIGIIKINLDILGNIKSYQKFGEVSKEIEAKILHME

SEQ ID NO: 3195 - protein, 623 aa, Unknown
  Description of Unknown: uncultivated organism sequence
  Category: MG91 effectors
  Description: MG91-387 effector
MYICSRLHSYTIVSETFVLTLPLKVEKWQADILDKRYELLRHTYNMVQQKLLRQYIYFSQQKAFKACKNFQQKREFFVSHPFHFRGINGKNGEPSDIKFPYTFESRSSNSGKRPSGGISDYVSKLWSHRIGQDKTLSNLGINSYILEELGLHIMKAWETRLYVPKSSRISFREFGDINSFGSRYKKGNFAGFTINLEEGFITYNTNGRKGEKANLVKLPIDFSREKKSYAVEALKGGKDSIRKLLIVRRQIRGRNKYYLQFTINGEKPQKGRTLGIGNVGIDIGPSTIATSSLQGVHFDKLADKCDNIEHELYLVNRKLDRSRRANNPQNYNADGTIKRGVRLVWKKDKEVKRYATLKMLRRELYRKQAEIRKQQHLEMANTMLSQGDTFIVENNPIDAWVRRAKDTTKTKTGRNRCKKRYGKSVANHAPAMFVSLLKNKVLSLGGHFYEVDTRYAATQFDFINGVRTKHEVSERSITLSNGRTHHRDMLSAFNLQHIKLESIGTEDRDYDIKQMEADYPIFCKLETTEQERFKEARRNERDALYFVGAAEKQLRRKPQEETVANRHNGGVGRKHCNTRLGSSIKENAKITGSGLVRESIERISQVPNEYHHAGSHPIILDGL

SEQ ID NO: 3196 - protein, 1352 aa, Unknown
  Description of Unknown: uncultivated organism sequence
  Category: MG91 effectors
  Description: MG91-388 effector
MTAFKYYLGLDMGTNSVGWAATDPGYRLLKAKGKDLWGIREFNEASGAVERRTHRISRRRRQREQVRIGILKDYFHDAICEVDPSFFQRLENSKYHEEDKDVEVRYKNNIFNDSNYTDKDYFNEYPTIYHLRNELISSTEKHDVRLVFLALLNMFKHRGHFLNAGLGENNGESNIDNAYFELTELLSELTEYHLSQDIDCKQIEAILSRRDMSRTHKAEELAGVLHVDLKNKPYKELIRGLCGLKFNACVVFPDVQSEEVTKLDICLSESTFDEKSDEIANIIGEDYFEIIMAMKEMFDIGSLASIMKGHNYLSQARVASYTKHKEDLKLLKEVIKKYCGKKEYDKFFNSDADGSYASYVGSYNSKNKERRVGNKRTSEELYKEIKKLLKDAQKEDENVQKILTSIENETFLPKQLTASNGVIPNQVHAREMKKILSNAENYLPFLTEKDETGLSVSERILKLFTFQIPYYVGPTSENSGKNGGNGWVVRREDGQVLPWNIDEKIDMKATSEAFISRMVRRCTYISGEQVLPKASLEYQSYCVLNEINNIKIDGERISVELKQDIYKAVFQKGKKVTKKQLCKYLHTRGIIETEEQVTGVDVSINNALTTYGKFKPIFGEDISKDSVQKMIEDIVFWCTVYGDSKKFLKDRIEEKYGNKLSEEQIKRILGFKFKDWGNLSKKFLELNGADTSTGESISIIRALWNNNLNLMELINSSLYNYKECLAEYQNTMLKTLSEIEAEDLNEYYFSAPVRRMIWQTILVIKELVKVLGCEPERIFVEMTRRPDEHKTRTSSRRNKFEELYKKVKDEATDWMQVIAKAEEDGKIRSKKMYLYLTQKGRCMYTGKHIELDDLFDKNLYDIDHIYPRHFVKDDNIDNNLVLVCKEKNAHKSDHYPIEEEIFLSQKKMWLELRKSGFITEEKYNRLMGRSPFSDEQKAGFIARQLVETSQGTKGVANILRQLLPGSKIVYAKASNVSEFRHTRDDIPKSRLVNDFHHAHDAYLNIVVGNVYYVKFTQNPLNFIKKDYDKYKEDYNLSKMFDWDVKRNGEVAWIAQRKDGEAGTITTVKKMLSRNTPLMTRYSFEGKGGLANETLYSAKKAKGEGYIPFKSSDDKMQDVTKYGGFTKVTGAYFFLVEHTEKKKRIRTIESVPVSFVQKIEKNLGELKKYCEEILGLVDADIRLKKIKIGSLIKRNGYFCYITGKTGNRLSVRNAVNLCLKNEWIKYISKLEKVKEKDTIDEIITKEKNEVLYSELIQKFKHCIFSKRPNPVGDKLEKGSEKFSNLSIKDQCAVLCQVLRMAAILGSECDMTLLGESSICGEMKISKKIGDEEIYLINQSVTGLYEKKINLHTV

SEQ ID NO: 3197 - protein, 1293 aa, Unknown
  Description of Unknown: uncultivated organism sequence
  Category: MG91 effectors
  Description: MG91-389 effector
MEKEYYLGLDMGTNSVGWAVTDDAYNLIRFKGKDMWGIREFDEANPAVERRTHRTSRRREQRNAVRMGLIRSYFADEIQKVDSNFYQRLDNSFFYVEDKQDNVKDKNGIFNDKNYKDANYYKQYPTIFHLRKELIEDASQKDVRLVYLAVANMFKHRGHFLLSGMGSESSKQTITDLYNQVSGLITEEYGISLKTDIAGTDFEQVLCSREYSRTRKSEKVCEILEIKNSDKLKKAFVKSMCGLSVKITDIIDDTFTEISDEDKKITFSFVDSDYDEKAGVLEEKLGTDVYDIISKLKEIHDKAQVAEIMKNYQYLSFARVADYEKHKKDLKILKRVVKKYFEPTVYDKLFRSEENGTYSAYVNSFNSEEKSRRNYKERKQEDLYNSIKKLLKSVDNVDDTDIEYIKNEMDKENFLPKQLTFKNGVIPNQIHASELKAILKNAEKYLPFLNEKDESGYTVSERILMLFSFQIPYYVGPVSSNSNGWVKRLEPGQVLPWNIDKKIDLKETSEQFIQRMVRNCTYIAGEKVLPKASLLYENFKVLNEINNLSINGERITVNLKQDLYNTLFLKGKRVTRKQIFNYFHSRGLVEEDSQISGIDIAVNNSLSTYGKFLPLFGEHLKEDKYKKMVDDIVFWCTVYGDSRKFLREQLEEKYSDVLDENQIKRITGMKFKDWGNLSKEFLELSGCCKSTGEVMPLIRAMWETNYNLMELLHSEEFTYSEELEEKQGKIEKVLSEYTIDDLNEEYFSAPVKRMVWQTLLIIKEIEKIMKCPPTRIFVEMTRKDDEKGDNGRKSSRKDQLLALYKKIQSEDKEWKKEMSSRIEDYDKNGALRSKKLYLYFIQKGLDMYTGKPIDLDNLMSANSNYDIDHIYPRHFVKDDNINNNLVLASKPANAEKSDIYPIKDSIYQKMKYTWKVLRDEGLITEEKYKRLTGRNPFTDEQKAGFIARQLVETGQGTKGVADLLTALLPDTKLVYSKAGNVSDFRKRYDIPKSRLINDFHHAHDAYLNIVVGNIYFTKFTSNPLNYIRKECSSKDNKYQYNLGNMYKWDVKRDGKTAWVAPEEGETGTLATVKKMLSRNTPILTRLTIEGHGGIADATLYSHKKAKQDTYIPLKSSDARMADVTKYGGYSSVTTAYLFLVEHEIKGKKIRTLETVPLYLKDRLENSKEKLEEYCRETLGYTNPSVRMKKIKLQSLIKLNGYYMQISGKTNKQFTVRNYVQFCLNSKWVDYIHKLEKYQDKGVIDDAITDEKNVELYNVLCEKHSVGIFTLRPNPVGDKIKKGYEKVLSVLYSH

SEQ ID NO: 3198 - protein, 1357 aa, Unknown
  Description of Unknown: uncultivated organism sequence
  Category: MG91 effectors
  Description: MG91-390 effector
MQGYYLGLDMGTNSVGWAVTDYEYRLLRFKGKDMWGIREFDEAKPAVERRRHRTNRRRQQRKMVRLGLIKSYFADEISKIDPLFFNRLDNSKYFLEDKDEQVRCKNAIFNDINYTDKDYYAQYPTVFHLRKELIENKEPHDVRLVYLAISNMFKHRGNFLISGLGIDRDDETIGEAYLKVADMLSEEFDVEFDKKIDLSFFEKTLSSREYSRTKKSELICDILQVKNSEKQKKAFVKCLCGLNVKISDIIGENGIELSDEDKKTAFSFNDNDYDVKIIEIEQKIGENKTTVIAKLKEIHDKALLSEIMKGKPYLSYARVADYEKHAYDLKILKRVIKKYFSNQEYDNLFRSEENGTYSAYVNSYNSGNKSRRNYKERKQEDLYKNIKSLMKSLGDNDDIDVQYIKDEIDRENFLPKQLTFKNGVIPNQVHANELKAILNNAQEYLTFLNEKDESGYTVSERIQQLFSFQIPYYVGPVSSDSNGWVVRKEEGPVLPWNIKEKIDLKKTSEEFIGRMVRNCTYISGERVLPKASLLYEKYRVLNEINNLRIDGERISVELKQDIFNTLFLKGKRVTRKQIFNYLHSRGMAQEDAQISGIDVTVNNSLSTYGKFLPIFGEHLKEDSYKKMAENIVFWCTVYGDSKKFLKEQLEEKYADKLDEAQIKRILGMKFNDWGNLSKEFFELSGCNKSTGEVMPLINALWENNLNMIELLNSDEFTYKESLAEKQNVAIKSLSEYTIDDLNEEYFSAPVKRMIWQTLMIIKEIEKIMKASPDRVFIEMTRKDGEKGDKGRKNSRKDKLIALYKQIRSEDSAWKKEMSSRIEKYDENGSLRSKKLYLYFTQKGLDMYTGKPIDIDDLMSANSKYDIDHIYPRHFVKDDNINNNLVLASKTANSEKSDIYPIKDTIYQKMKSTWKLLKDENLITEEKYRRLVGREPFTDEQKAGFIARQLVETSQGTKGVADLLNMLLPDSKIVYSKADNVSEFRHKYEIPKSRLINDYHHANDAYLNIVVGNVYYTKFTQNPINFIKKEYSSGDRKFEYNLSKMFEWDVVRGDKVAWVAEKDRKHGTIVTVKKMINKNTPILTRMPVEGHGGLADATLYSHKKAKSDTYIPLKATDAKLQDVTKYGGFSSVATAYIFLVEHELKGKKVRTLETVPLYMKAELESSVERLEQYCRDTLGLINPSVRIKKIKLQSLIKLNGYYMQISGKTDKQFGMRNCVQLCLKKEWIEYVHKLEKFQSYGVIDDIISEQNNIKLYDELCEKHRNGIYNKKPNYMGDKLLNGKNEFVKLNKNEQIKVLIQIIKLTVVGLVEGDLTLIKESSKSGTLKISKNITNAKEFELINQSITGLYENRIDLLRV

SEQ ID NO: 3199 - protein, 1343 aa, Unknown
  Description of Unknown: uncultivated organism sequence
  Category: MG91 effectors
  Description: MG91-391 effector
MEYYMGLDMGTSSVGWAVTDEKYNLIKKHGKDMWGIREFEEADTAEARRTFRVARRRRQREVVRIGLLKEYFHDEVIKVDPNFFQRLENSKYFQEDKDEEVNEKYGIFADKNYTDKDYFKKYPTIYHLRKELLHSQEPHDVRLIYLALLNMYKHRGHFLNASLGIDGENRKMKDIYCDFVLMARDVLELEFPTEFGEVQFQNLMCARDLSRKKKAEKLIDLLGIDKKQKQHIALLECILGLDKSVKTLYGKKLADDFDKSIKINFSDSGFDEKAEELADILGEERFDLILCMKELYDSATLNQIMGTHKYLSEARVQEYEKHKNDLKKLKCVIKKYGTREQYAFLFRSVEKATYSAYVRSVNSGGKERRNMSERTKDALYATLKKILKEFPADDKDCIYIMEEIEKNHFLPKQMTSANGVIPNQIHAKEMKQILKNAEKYLSFLSEKDESGLSVSERILQLFTFQIPYYIGPLSTNSAKNNGNGWVIRKEEGKVFPWNMDQKIDKKKTSEEFISRMVRRCTYMGGEQVLPKSSLEYECFSVLNELNNLKVRNEKLPVEIKQKIYTDLFTRGKKVSKKSIANYLKGCGILQEGAEDELTGMMDSINSSLSSYGKFRAIFGDQMKEDSCKKMIEKIIFWCTVYGNSKQFLKEQMEENYGSILTQNQIKRILGFKLKDWGNLSKEFLELQGSRKDTGEKMSLIRMLWETNDNLMELLDNSQYTYKKELEKRQENLEKTLKEIQPEDLEGYYFSAPVKRMIWQTLLVLKETEKVMGQPPKRLFVEMTREHGEKNDIKDSRAKKFLDLYKNIREEDHDWKNVIENAEESGTIRSKKMYLYLTQRGRCMYTGNIIDLSQLFDNNLYDIDHIYPRHFVKDDNLENNMVLVEKQKNAHKSDKYPLEESIYNKQISFWRELHHQKLINDEKFKRLTDRNPFSDEQKAGFIARQLVETSQGTKGITKILKEVLPDTTMVYAKAKNVSDFRNQYKILKSRVVNEFHHAHDAYLNIVVGNVYYTKFTNNPINFIKKQEPYNLSRVFEWNVVRNGEEAWIAKPEKEQKITIETVRKMLARNTPLLTRLSFEGTGGLANQTLYGAEKAQGDGYIPLKSSDLKLRNVRKYGGFSSVSTAYFILVEHEQKKKRVRTLETVPILWKDRIEKDPKQLEVYCTEVLGLINSDIRIRKIRIQSLVKKDGYYMYLSGKTGNQIIMRNAVQLCLRQEWINYIKKLEKETIDEVITKEENSELYNLLCEKHLEGIYAKRPNPVGEKLRKRICEFNQLEITEQRQLLLELLNLSKIGVVKANLTLIGETSSAGTMKVSKNISESKEFKLIHQSITGLYEKQVDLLNV

SEQ ID NO: 3200 - protein, 1347 aa, Unknown
  Description of Unknown: uncultivated organism sequence
  Category: MG91 effectors
  Description: MG91-392 effector
MEEKEYYLGLDMGTNSVGWAVTDPQYIILRAKGKDMWGIREFESAETAETRRVHRTSRRRRQREVVRMGLVKDYFSDAINNVDGNFYARLENSKYHLEDKDETVRNKNGIFADEHYTDKEYYAEYPTIYHLIMELINNPAPHDVRLVYLAVANLFKRRGHFLNAGLSEDGGNQSMQTAYDEFNTTCNETLEFSFPGIDATQIEEVLKNRNYSKTVKSEKLAELLGVEKKEKQRIEILRAIAGRKVNAKVIFPNVETEDKVEFSFSDAAFDDNATELMTLLGDECYSLVLCMREMYDIGTLAEIMHGYQYLSESRMADYQKHHEDLVLLKSVIKSECTQKQYDELFRLDGEGSYSAYVNSILAKNHKQRRSMKGRTRDDFYKKVREFIGKSSNPDAIKICTEIENETFMPKMLTSANGIIPNQVHYKELKAILSNAEKYLPFLLEKDESGLTTSDRIQRLYKFRIPYYVGPVSNRDGKGNGWAVRKEEGMVLPWNLEEKIDLSKTKEAFIENLIRRCTYISDEKVLPKNSLIYEKFTVLNEINNIRINDERISVELKQDIYNDLFKKGKKVTRKTLAKYLINRGAIKAENQISGIDIAINNSLSSYGKFKAVFGESMDTDSTKKMVEDIIKTSTIYGDDKRELKNILRDKYGEILSEDQIKRIAGFRCKDWGRLSRAFLELAGTNCGTGEVTSIIQALWESQLNLMELLHSEDYTFGESLNEKLVKNEKSLSEITAEDLDDYYFSAPVKRMAWQTILLIKEISKIKGCEPSKIFIEMTRTDEEKGDKGRKNSRAKELTALYKNIKKEGKAWIELISKEDASGRLKSKKMYLYIKQMGRDMYTGEQIDLDRLFDDNLYDIDHIYPRHFVKDNNIENNLVLVNKAKNSRKSDNYPLDSDIVRNPKVRELWEMLHTNHLMSDEKYHRLTSRKAFTDEDMAGFIARQLVETGQATKGVADLLKDLTNSEIIYSKAGNVSDFRHTYDIPKSRIVNEFHHAHDAYLNIVVGNAYYTKFTSNPLNYIRKEYKKNTKENNYHLNKIFASTISRNGYVAWFAGSDKNPGTIQTVKKMLSRNTPLMTRMTFVVHGSIAEETLYGKNTAKEDSYLPLKGSDPRMSVEKYGGFKKASGAYFFLVEHELKGKKVRTIETVPVYLMKKLSDKRELQKYCEEKLGLINPSIRLKQIKMQSLIKLNGYFVNVTGRTNKQLTLRNAVNLKLDKEDIYIIHLVEKCIGEERDDRLSEESILSLYQTLTEKQVSGIYRNRPNSVYEKLNEGMIRFKKLERKQQIKVLANMLNLTMVGKAQADLKDIGGSANSGVMLMAKKINNYNEVKLINQSVTGLYQTEVDLLTV

SEQ ID NO: 3201 - protein, 1352 aa, Unknown
  Description of Unknown: uncultivated organism sequence
  Category: MG91 effectors
  Description: MG91-393 effector
MTAFKYYLGLDMGTNSVGWAATDPEYRLLKAKGKDLWGIREFNEASGAVERRTHRISRRRRQREQVRIGILKDYFHDAICEVDPSFFRRLENSKYHEEDKDVEVRYKNNIFNDGNYTDKDYFNEYPTIYHLRNELISSTEKHDVRLVFLALLNMFKHRGHFLNAGLGENNGESNIDNAYFELTELLSELTEYHLSQDIDCKQIEAILSRRDMSRTHKAEELAGVLHVDLKNKPYKELIRGLCGLKFNACVVFPDVQSEEVTKLDICLSESSFDEKSDEIANIIGEDYFEIIMAMKEMFDIGSLASIMKGHNYLSQARVASYTKHKEDLKLLKEVIKKYCGKKEYDKFFNSDADGSYASYVGSYNSKNKERRVGNKRTSEELYKEIKKLLKDAPKEDENVQKILTSIENETFLPKQLTASNGVIPNQVHAREMKKILSNAENYLPFLTEKDETGLSVSERILKLFTFQIPYYVGPTSENSGKNGGNGWVVRREDGQVLPWNIDEKIDMKATSEAFISRMVRRCTYISGEQVLPKASLEYQSYCVLNEINNIKIDGERISVELKQDIYKAVFQKGKKVTKKQLCKYLHTRGIIETEEQVTGVDVSINNALTTYGKFKPIFGEDISKDSVQKMIEDIVFWCTVYGDSKKFLKDRIEEKYGNKLSEEQIKRILGFKFKDWGNLSKKFLELNGADTSTGESISIIRALWNNNLNLMELINSSLYNYKECLAEYQNTMLKTLSEIEAEDLNEYYFSAPVRRIIWQTILVIKELVKVLGCEPERIFVEMTRKPDEHKTRTSSRRNKFEELYKKVKDEATDWMQVIAKAEEDGKIRSKKMYLYLTQKGRCMYTGKHIELDDLFDKNLYDIDHIYPRHFVKDDNIDNNLVLVCKEKNAHKSDHYPIEEEIFLSQKKMWLELRKSEFITEEKYNRLMGRSPFSDEQKAGFIARQLVETSQGTKGVANILRQLLPGSKIVYAKASNVSEFRHTRDDIPKSRLVNDFHHAHDAYLNIVVGNVYYVKFTQNPLNFIKKDYDKYKEDYNLSKMFDWDVKRNGEVAWIAQRKDGEAGTITTVKRMLSRNTPLMTRYSFEGKGGLANETLCSAKKAKGEGYIPFKSSDDKMQDVTKYGGFTKVTGAYFFLVEHTEKKKRIRTIESVPVYLAQKIEQNPDELKKYCEEILGLVDADIRLKKIKIGSLIKRNGYFCYITGKTGNRLSVRNAVNLCLKNEWIKYISKLEKVKEKDAVDEIITKEKNEVLYSELIQKFKHGIFSKRPNPVEDKLEKGSEKFSNLSIKEQCAVLCQILQLAAVLGSECDMTLLGESAHCGKMLISKKIGDEEIYLLNQSVTGLYEKKINLHTV

SEQ ID NO: 3202 - protein, 1358 aa, Unknown
  Description of Unknown: uncultivated organism sequence
  Category: MG91 effectors
  Description: MG91-394 effector
MEKEYYLGLDMGTNSVGWAVTDDAYNLIRFKGKDMWGIREFDEANPAVERRTHRTSRRREQRNAVRMGLIRSYFADEIQKVDSNFYQRLDNSFFHVEDKQDNVKDKNGIFNDKNYKDADYYKQYPTIFHLRKELIEDASQKDVRLVYLAVANMFKHRGHFLLSGIGSESSKQTITDLYNQVSGLITEEYGISLKTDIAGTDFEQVLCSREYSRTRKSEKVCEILEIKNSDKLKKAFVKSMCGLSVKITDVIDDTFTEISDEDKKITFSFVDSDYDEKAGVLEEKLGTDVYDIISKLKEIHDKAQVAEIMKNYQYLSFARVADYEKHKKDLKILKRVVKKYFEPTVYDKLFRSGENGTYSAYVNSFNSGEKSRRNYKERKQEDLYNSIKKLIKSIDNVCDTDIEYIKNEIEKENFLPKQLTFKNGVIPNQIHASELKAILKNAEKYLPFLNEKDESGYTVSERILMLFSFQIPYYVGPVSSNSNGWVKRLEPGQVLPWNIDKKIDLKETSEQFIQRMVRNCTYIAGEKVLPKASLLYENFKVLNEINNLSINGERIAVALKQDLYNTLFLKGKRVTRKQIFNYFHSRGLVEEDSQISGIDIAVNNSLSTYGKFLPLFGEHLKEDKYKKMVDDIVFWCTVYGDSRKFLREQLEEKYSDVLDENQIKRITGMKFKDWGNLSKEFLELSGCCKSTGEMIPLIRAMWETNYNLMELLHSEEFTYSEELEEKQGKIEKVLSEYTIDDLNEEYFSAPVKRMVWQTLLIIKEIEKIMKCPPTRIFVEMTRKDDEKGDNGRKSSRKDQLLALYKKIQSEDKEWKKEMSSRIEDYDKNGALRSKKLYLYFIQKGLDMYTGKPIDLDNLMSANSNYDIDHIYPRHFVKDDNINNNLVLASKPANAEKSDIYPIKDSIYQKMKYTWKVLRDEGLITEEKYKRLTGRNPFTDEQKAGFIARQLVETGQGTKGVADLLTALLPDTKLVYSKAGNVSDFRKRYDIPKSRLINDFHHAHDAYLNIVVGNIYFTKFTSNPLNYIRKECSSKDNKYQYNLGNMYKWDVKRDGKTAWIAAKEGETGTIATVKKILSRNTPTLTRLTIEGHGGIADATLYSHKKAKQDAYIPLKSSDARMADVTKYGGYSSVTTAYLFLVEHEIKGKKIRTLETVPLYLKDRLENSKEKLEEYCRESLGYTNPSVRMKKIKLQSLIKLNGYYMQISGKSIKQFEVRNYVQICLNGKWVDYIHKLEKYQDKGVIDNAITDEKNVELYNILCEKHSVGIFTLRPNPVGDKIKKGYDKFVNLTTEEQIKLLIEIIKLTCVGIVKADLRLIGASEKSGTMKINKNITDAKECFLINQSVTGLYENRIDLLRV

SEQ ID NO: 3203 - protein, 1215 aa, Unknown
  Description of Unknown: uncultivated organism sequence
  Category: MG91 effectors
  Description: MG91-395 effector
MYNRYYLGLDMGTSTVGWAVTDPDYKLIRKSGKDMWGIREFEEGKTAAERRVNRIARRRRQRETARIGLLKEYFHDAIVAVDPLFYQRLDNSRYWPEDKDAVLSSKNSLFHDKDYTDADYYREYPTIFHLRMELIKNPKPHDVRLVYLALLNMFKHRGHFLLNGNLSEDSGSDMGTLCRACLERFEEIDISLVGVSGDEIENVLSLRDLSRSGKAEKLMDLLNISNKQKKEVLWVKAICGLKVDVTKLFNSINTEEKLDLCFADAGFEEKVPEITEAIGEENAQILFLMKAIFDRGILARLLKGSNYLSEARIKDYEKHKSDLSLLKHLVRKYCTEDVYDKMFRAPEAGSYSAYVNSTLTGDEKKRRNMGGRSREDFYKTVKNCFKDIKTPDDDLQRVLRDIDNEDFMPKQLTASNGVIPNQLHQKEMERILDNARKYLPFLNQKDERGLCVYERILRLFTFQIPYYIGPVTENSSKNGGTGWVVRKEKGQVLPWNFQDKIDIPATSEQFIQRMVRNCTYMSGEKVLPKSSLLYESYCVLNEINNIRINGEKITVELKQDLYNDLFKKGRKVTKKQLVKYLINQGVMKEEAELSGIDVTVNNSLGSYGKFAAVFGPEIETDSGKTMIENIIYWGTVFGQDKNLWKQKIQQNYPEITRTVLKRILGYRFSDWGRMSRTFLEMEGCDKNTGEIRSLIRSMWETNHNLMELLDRNLFTYREDLEKQQKKQFSSLSEITPEVLDDYYFSAPVKKMIWQTFGVIREVEKVMGCPPEKIFVEMTRTDEEKGDKGRKDSRKKVLLEKFRGIKEASRDWRDFIEKEDQSGRLRSKKMFLYISQLGKDMYSGEAIDLDRLFDDNLYDIDHIYPRHFVKDDSIHNNLVLVKKQTNAHKSDTYPLENSIRSNPAVTSLWHLLREKGLITEEKYRRLTGRNPFSEEQQADFIARQMVETGQATKGVSELLKEAVPEASIVYSKAGNVSDFRRTYDLLKSRSVNDFHHAHDAYLNIVVGNAYYVKFTQNPLNYIRKEYRNGTKNGEYNLSKMFERNIVRNGETAWIASEKKDPGTIATVKAMLKRNTPILTRQSFIAHGALTDATVYGKDIAKAKVYLPTKTSDQRLQDVTKYGGLNKAAVAYFSLVEHTVKGKKVRTLEAIPVYLKEKVEMHPEELNIYLTDYLGLKDVSVRMRVVRIQSLIKVDGYYAYISGNNDNRIMLRYAIKL

SEQ ID NO: 3204 - protein, 1358 aa, Unknown
  Description of Unknown: uncultivated organism sequence
  Category: MG91 effectors
  Description: MG91-396 effector
MEKEYYLGLDMGTNSVGWAVTDDAYNLIRFKGKDMWGIREFDEANPAVERRTHRTSRRREQRNAVRMGLIRSYFADEIQKVDSNFYQRLDNSFFHVEDKQDNVKDKNGIFNDKNYKDADYYKQYPTIFHLRKELIEDASQKDVRLVYLAVANMFKHRGHFLLSGIGSESSKQTITDLYNQVSGLITEEYGISLKTDIAGTDFEQVLCSREYSRTRKSEKVCEILEIKNSDKLKKAFVKSMCGLSVKITDVIDDTFTEISDEDKKITFSFVDSDYDEKAGVLEEKLGTDVYDIISKLKEIHDKAQVAEIMKNYQYLSFARVADYEKHKKDLKILKRVVKKYFEPTVYDKLFRSGENGTYSAYVNSFNSGEKSRRNYKERKQEDLYNSIKKLIKSIDNVCDTDIEYIKNEIEKENFLPKQLTFKNGVIPNQIHASELKAILKNAEKYLPFLNEKDESGYTVSERILMLFSFQIPYYVGPVSPNSNGWVKRLEPGQVLPWNIDKKIDLKETSEQFIQRMVRNCTYIAGEKVLPKASLLYENFKVLNEINNLSINGERIAVALKQDLYNTLFLKGKRVTRKQIFNYFHSRGLVEEDSQISGIDIAVNNSLSTYGKFLPLFGEHLKEDKYKKMVDDIVFWCTVYGDSRKFLREQLEEKYSDVLDENQIKRITGMKFKDWGNLSKEFLELSGCCKSTGEMIPLIRAMWETNYNLMELLHSEEFTYSEELEEKQGKIEKVLSEYTIDDLNEEYFSAPVKRMVWQTLLIIKEIEKIMKCPPTRIFVEMTRKDDEKGDNGRKSSRKDQLLALYKKIQSEDKEWKKEMSSRIEDYDKNGALRSKKLYLYFIQKGLDMYTGKPIDLDNLMSANSNYDIDHIYPRHFVKDDNINNNLVLASKPANAEKSDIYPIKDSIYQKMKYTWKVLRDEGLITEEKYKRLTGRNPFTDEQKAGFIARQLVETGQGTKGVADLLTALLPDTKLVYSKAGNVSDFRKRYDIPKSRLINDFHHAHDAYLNIVVGNIYFTKFTSNPLNYIRKECSSKDNKYQYNLGNMYKWDVKRDGKTAWIAAKEGETGTIATVKKILSRNTPTLTRLTIEGHGGIADATLYSHKKAKQDAYIPLKSSDARMADVTKYGGYSSVTTAYLFLVEHEIKGKKIRTLETVPLYLKDRLENSKEKLEEYCRETLGYTNPSVRMKKIKLQSLIKLNGYYMQISGKTNKQFTVRNYVQFCLNSKWVDYIHKLEKYQDKGVIDDAITDEKNVELYNVLCEKHSVGIFTLRPNPVGDKIKKGYDKFVNLTTEEQIKLLIEIIKLTCVGIVSANLTLIGGAAISGKMLISKNITDAKECLLINQSVTGLYENRIDLLRV

SEQ ID NO: 3205 - protein, 1107 aa, Unknown
  Description of Unknown: uncultivated organism sequence
  Category: MG91 effectors
  Description: MG91-397 effector
MNILSLDLGITSIGYSILEKKENNRYSLIDYGVSMFDAPFDKDGKSKKLLHSTNTSMSNLYAKRKQRKKALANLFEKFGLAKAQKLLQQEKQNIYKNKWQLRCKDVFERKLNIGEFFTILYFIAKHRGYKSLDTNELLEELCEELKLDCGLKSSQKDDEKGKIKQALKRVEELKQNTNKTVAQIIYEIESKKQTPTFRNHDNYNYMIRREYIEDELKKLVESQVKFGLFGNTFDKEKFINELKEIIVKQKESSNDLNLFANCEYYKEHKVANQYSVVADIFKMYESVINIKLNKEKITKEQIQLIADDFFTKIKKGKNIPDIKYKDIRKILKLSDDIKIFDKKDSYVRKGKTIHHTITKFHFLNNLSKFDNSFIVENLKNLENLAEIFEVLNKEKSPKTIFEQLKGKVDEKTIIELIKYKNGKSLNISHYAMLKFIPYFQEGLTTDEIKKKLDLNRNEDYSKYKKGIKYLHVNQFEKDDNLEINNHPVKYIVSAVMRVVKHLHTLYGPFDEIKVESTRELSLPKKVKDKIDKVNKDNEAKYLAVLKNEAYLSAAKYHNKNIQKYKEQLVLYEEQEGRDIYTWQGIEIDDIFKDKLEVDHIVPQSLGGLSVKHNKVLCFKNSNATKGNRLPMNYIKDTESFRKNIEYLYTKKVINGKKLKNLLATNLDEIYKDTFESKSLRATSYVEALTAQMLKRYYPFADKQKQKDGNAVMYIQGRATANIRKLLHVKAKTRGTNIHHAIDALIIGVTSHSWLKKISNTFRENYGVIDDKARENIKKELPLIEGVSVAELVAHIEENYNFDGEESVFYRDIFGNVKVVPFWVSKKSMVSKIHKDTIYAKKPDGIFTVREKILDKFIALKITPTTSPDEFMKKFQKEILEKMYLYKTNPKDKICQIIQQRAFDIAQLLDNLQLEDTTDKEMLSETKKYLDEFIHQDLKDHNSNVIRKVQFYQTNLTGFEIRGGLATKEKTFIGFSATLNGDKIEYKRIDVANFETIKKDAGFKVYKNDIVFFIYPDGSFKGGKIVSFLEEKNVASFSNLRYPANINLQPHSFVTLFKGKANSHKQHSINKAIGIIKLHLDIIGNIKSFSSLGEVDSELLSFLKKLKD

SEQ ID NO: 3206 - protein, 1358 aa, Unknown
  Description of Unknown: uncultivated organism sequence
  Category: MG91 effectors
  Description: MG91-398 effector
MEKEYYLGLDMGTNSVGWAVTDDAYNLIRFKGKDMWGIREFDEANPAVERRTHRTSRRREQRNAVRMGLIRSYFADEIQKVDSNFYQRLDNSFFHVEDKQDNVKDKNGIFNDKNYKDADYYKQYPTIFHLRKELIEDASQKDVRLVYLAVANMFKHRGHFLLSGIGSESSKQTITDLYNQVSGLITEEYGISLKTDIAGTDFEQVLCSREYSRTRKSEKVCEILEIKNSDKLKKAFVKSMCGLSVKITDIIDDTFTEISDEDKKITFSFVDSDYDEKAGVLEEKLGTDVYDIISKLKEIHDKAQVAEIMKNYQYLSFARVADYEKHKKDLKILKRVVKKYFEPTVYDKLFRSEENGTYSAYVNSFNSEEKSRRNYKERKQEDLYNSIKKLLKSVDNVDDTDIEYIKNEMDKENFLPKQLTFKNGVIPNQIHASELKAILKNAEKYLPFLNEKDESGYTVSERISMLFSFQIPYYVGPVSSNSNGWVKRLEPGQVLPWNIDKKIDLKETSEQFIQRMVRNCTYIAGEKVLPKASLLYENFKVLNEINNLSINGERITVNLKQDLYNTLFLKGKRVTRKQIFNYFHSRGLVEEDSQISGIDIAVNNSLSTYGKFLPLFGEHLKEDKYKKMVDDIVFWCTVYGDSRKFLREQLEEKYSDVLDENQIKRITGMKFKDWGNLSKEFLELSGCCKSTGEMIPLIRAMWETNYNLMELLHSEEFTYSEELEEKQGKIEKVLSEYTIDDLNEEYFSAPVKRMVWQTLLIIKEIEKIMKCHPTRIFIEMTRKDDEKGDNGRKSSRKDQLLALYKKIQSEDKEWKKEMSSRIEDYDKNGALRSKKLYLYFIQKGLDMYTGKPIDLDNLMSANSNYDIDHIYPRHFVKDDNINNNLVLASKPANAEKSDIYPIKDSIYQKMKYTWKVLRDEGLITEEKYKRLTGRNPFTDEQKAGFIARQLVETGQGTKGVADLLTALLPDTKLVYSKAGNVSDFRKRYDIPKSRLINDFHHAHDAYLNIVVGNIYFTKFTSNPLNYIRKECSSKDNKYQYNLGNMYKWDVKRDGKTAWIAAKEGETGTIATVKKMLSRNTPTLTRLTIEGHGGIADATLYSHKKAKQDAYIPLKSSDARMADVTKYGGYSSVTTAYLFLVEHEIKGKKIRTLETVPLYLKDRLENSKEKLEEYCRETLGYTNPSVRMKKIKLQSLIKLNGYYMQISGKTNKQFTVRNYVQFCLNSKWVDYIHKLEKYQDKGVIDDAITDEKNVELYNVLCEKHSVGIFTLRPNPVGDKIKNGYDKFVNLTTEEQIKLLIEIIKLTCVGIVSANLTLIGGASISGKMLISKNITDAKECLLINQSVTGLYENRIDLLRV

SEQ ID NO: 3207 - protein, 1358 aa, Unknown
  Description of Unknown: uncultivated organism sequence
  Category: MG91 effectors
  Description: MG91-399 effector
MEKEYYLGLDMGTNSVGWAVTDDAYNLIRFKGKDMWGIREFDEANPAVERRTHRTSRRREQRNAVRMGLIRSYFADEIQKVDSNFYQRLDNSFFHVEDKQDNVKDKNGIFNDKNYKDADYYKQYPTIFHLRKELIEDASQKDVRLVYLAVANMFKHRGHFLLSGIGSESSKQTITDLYNQVSGLITEEYGISLKTDIAGTDFEQVLCSREYSRTRKSEKVCEILEIKNSDKLKKAFVKSMCGLSVKITDVIDDTFTEISDEDKKITFSFVDSDYDEKAGVLEEKLGTDVYDIISKLKEIHDKAQVAEIMKNYQYLSFARVADYEKHKKDLKILKRVVKKYFEPTVYDKLFRSGENGTYSAYVNSFNSGEKSRRNYKERKQEDLYNSIKKLLKSIDNVCDTDIEYIKNEIEKENFLPKQLTFKNGVIPNQIHASELKAILKNAEKYLPFLNEKDESGYTVSERILMLFSFQIPYYVGPVSSNSNGWVKRLEPGQVLPWNIDKKIDLKETSEQFIQRMVRNCTYIAGEKVLPKASLLYENFKVLNEINNLSINGERIAVALKQDLYNTLFLKGKRVTRKQIFNYFHSRGLVEEDSQISGIDIAVNNSLSTYGKFLPLFGEHLKEDKYKKMVDDIVFWCTVYGDSRKFLREQLEEKYSDVLDENQIKRITGMKFKDWGNLSKEFLELLGCCKSTGEMIPLIRAMWETNYNLMELLHSEEFTYSEELEEKQGKIEKVLSEYTIDDLNEEYFSAPVKRMVWQTLLIIKEIEKIMKCPPTRIFVEMTRKDDEKGDNGRKSSRKDQLLALYKKIQSEDKEWKKEMSSRIEDYDKNGALRSKKLYLYFIQKGLDMYTGKPIDLDNLMSANSNYDIDHIYPRHFVKDDNINNNLVLASKTANAEKSDIYPIKDSIYQKMKYTWKVLRDEGLITEEKYKRLTGRNPFTDEQKAGFIARQLVETGQGTKGVADLLTALLPDTKLVYSKAGNVSDFRKRYDIPKSRLINDFHHAHDAYLNIVVGNIYFTKFTSNPLNYIRKECSSKDNKYQYNLGNMYKWDVKRDGKTAWIAAKEGETGTIATVKKMLSRNTPTLTRLTIEGHGGIADATLYSHKKAKQDAYIPLKSSDARMADVTKYGGYSSVTTAYLFLVEHEIKGKKIRTLETVPLYLKDRLENSKEKLEEYCRETLGYTNPSVRMKKIKLQSLIKLNGYYMQISGKTNKQFTVRNYVQFCLNSKWVDYIHKLEKYQDKGVIDDAITDEKNVELYNVLCEKHSVGIFTLRPNPVGDKIKKGYDKFVNLTTEEQIKLLIEIIKLTCVGIVSANLTLIGGASISGKMLISKNITDAKECLLINQSVTGLYENRIDLLRV

SEQ ID NO: 3208 - protein, 603 aa, Unknown
  Description of Unknown: uncultivated organism sequence
  Category: MG91 effectors
  Description: MG91-400 effector
MAKENFVLTLPLRVDKCQADILDKRYELLRLIYNMVQQKLVRQYIYFSQQKAFKACESFEQKREFFNTHPFHFKGIKGKNGELCDIKFPYTYESRSSSSGKRPSGGISDYVSKLWSHKVGADKRLVDFGLNGSIMEELGLHVMKAWEDRLYKYKTKRVSFKGYGAINSLGCRYHKGNFAGFTINLEEGFITFNTNGRHGQFADIITLPIDFSREKKGYAAEAFKSGVDSLRKLIIVRRCIRGRNKYYLQLTISGEKPQKGRTLGKGNVGIDIGPSTIATSSLQGVHFDKLADKCDNIEHELYLINRKLDRSRRVNNPENYNPDGTIKRGVRLVWKKDKDVRRYASLKQQRKELYRKQAETRKQQHLEMANAILSQGDTFIVENNPIDAWVRRAKETKKNKTGKIRCKKRYGKSVANHAPAMFVSILKNKVQSLGGMFREVDPGYAATQFDFTNGVFTKHEVSERSITLSNGRTHQRDMLSAFNLQHIGQELKEYDIEQMQADYSIFCRLEAAEQERFKETRRNERDALYFVGAFAKKLRHEPQEETVANRHNGGVGRKHCNTLCTENAKITGSGLVRESIERVSEAPEECHHIGNQPIILDGL

SEQ ID NO: 3209 - protein, 1347 aa, Unknown
  Description of Unknown: uncultivated organism sequence
  Category: MG91 effectors
  Description: MG91-401 effector
MEEKEYYLGLDMGTNSVGWAVTDPQYTILRAKGKDMWGIREFESAETAEKRRGHRTSRRRRQREVVRMGLVKDYFSDAINNVDGNFYARLENSKYHLEDKDEAVRNKNGIFADEHYTDKEYYAEYPTIYHLIMELINNPAPHDVRLVYLAVANLFKRRGHFLNAGLSEDGGNQSMQTAYDGFNTTCNETLGFSFPGINATQIEEVLKNRNYSKTVKSEKLAELLGVEKKEKQRIEILRAIAGRKVNAKVIFPNVETEDKVEFSFSDAAFDDNATELMTLLGDECYSLVLCMREMYDIGTLAEIMHGCQYLSESRMADYQKHHEDLVLLKSVIKSECTQKQYDELFRLDGEGSYSAYVNSTLAKNHKQRRSMKGRTRDDFYKKVRGLIGKSSNPDAIKICTEIENETFMPKMLTSANGIIPNQVHYKELKAILSNAEKYLSFLLEKDESGLTTSDRIQRLYKFRIPYYVGPVSNRDGKGNGWAVRKEEGTVLPWNLEEKIDLSKTKEAFIENLIRRCTYISDEKVLPKNSLIYEKFTVLNEINNIRINDERISVDLKQDIYNELFKKGKKVTRKTLAKYLINRGVIEAENQISGIDIAINNSLSSYGKFKAVFGESMDTDTTKKMVEDIIKTSTIYGDDKRELKNILRDKYGEILSEDQIKRIAGFRFKDWGRLSRAFLELAGADCRTGEVTSIIQALWESQLNLMELLHSEDYTFGESLNEKLVKNEKSLSEITAEDLDDYYFSAPVKRMAWQTILLIKEISKIKGCEPSKIFIEMTRTDEEKGDKGRKNSRAKELTALYKNIKKEGKAWIELIGKEDASGRLKSKKMYLYIKQMGRDMYTGEQIDLDRLFDDNLYDIDHIYPRHFVKDNNIENNLVLVNKAKNSRKSDNYPLDSDIVRNPKVRELWEMLHTNHLMSDEKYHRLTSRKAFTDEDMAGFIARQLVETGQATKGVADLLKELTSSEIIYSKAGNVSDFRHAYDIPKSRIVNEFHHAHDAYLNIVVGNAYYTKFTSNPLNYIRNEYKKNTKENNYHLNKIFESTISRNGYVAWLAGSDKNPGTIQTVKKMLSRNTPLMTRMTFVIHGSIAKETLCGKNIAKEDSYLPLKGSDPRMSVEKYGGFNKASGAYFFLVEHELKGKKVRTIETVPVYLMKKLSDERELQKYCEEKLGLINPSIRLKQIKMQSLIKLNGYFVNVTGRTNKQLTLRNAVNLKLDKEDIYIIHLVEKCIGEERDDRLSEESILSLYQTLTEKQASGIYRNRPNSVYEKLNEGMIRFKNLERKQQIKVLANILNLTMVGKAQADLKDIGGSANSGVMLMAKKINNYNEVKLINQSVTGLYQTEVDLLTV

SEQ ID NO: 3210 - protein, 1115 aa, Unknown
  Description of Unknown: uncultivated organism sequence
  Category: MG91 effectors
  Description: MG91-402 effector
MRAICGLKINAYTLFSDQLPDDTTKIDLCVSDASFDEKSEELVSLIGEDLFQIILNIKEIYDIGSLAGILKGYTYLSQARVAAYDKHKHDLKLLKSSIKKYCTKEEYNNFFNSDADGSYASYIGSFNSGNKERRVGSKRTSEDLYKEIKKLLKGANKSDPAINEIFTSIETESFLPKQLTASNGIIPNQVHSKEMARILTNAENYLPFLKETDENNLSISNRILQLYKFQIPYYIGPVTEKSQRDGGNGWVIRKDNGRVFPWNIEEKIDVKATSEAFISRMVRRCTYMNGKQVLPKASLEYESFRVLNEINNLRIDGERIPVTLKQDIYTDLFQKGKKVTKKQLCNYLATRGLIESSEQVTGIDIAINNSLSTYGKFKAIFGEDIKLDHIQHMIEDIVFWCTVYGDSKQFLKEQIEDKYKGKLSPEQMKRILGFKFKDWGNLSKEFFELKGADKSTGEAVSIIRALWENNLNLMELINSPEFDFKEQLADYEANSLKTLSDFEPEDLNDYYFSAPVRRMIWQTTLIIKELVHVLGKEPARIFIEMTREKDASRGRTLSRKKKFEDLYKNVKDENTDWAKVIEHADESGTIRSKKMYLYLTQKGRCMYTGNHIELSDLFNDNLYDIDHIYPRHFVKDDNIDNNLVLVTKEKNAHKSDNYPLEAEIFNKQRNMWTQLRKEGFISEEKYNRLMGRNAFTDEQKAGFIARQLVETSQGTKGVAELFHQLLPNSKIVYAKAGNVSDFRRNREFPKSRLVNDFHHAHDAYLNIVVGNVYYVKFTQNPINYIKNSYNKDMNKNNYNLSRMFDWDVKRGDEVAWIAQKQDGAAGTISTVKKMLSKNTPLMTRLSYEGKGALANETLYSAEKAKGEGYIPFKSSDTKIQDVTKYGGFTSVTGAYFFLVEHDEKKKRIRTIESVPLYLADKIDKDSSELERYCDKLGLVNYDVRVRKIKIGSLIKYNGYFCYITGKTGYRLIVRNATNLCLASNWRKYIKKIEKYKETTIIDNVITAEENIKLYNELLNKFTVGIFGRRPNPIGEKMDSARDKFASLSIENQCLALYQILQLTAILGNESDLQLIGASTHAGKMLISKKIGTDEIYLINQSPTGLFETKIDLQTI

SEQ ID NO: 3211 - protein, 1356 aa, Unknown
  Description of Unknown: uncultivated organism sequence
  Category: MG91 effectors
  Description: MG91-403 effector
MGRDYYLGLDMGTSSVGWAVTDEKYNLLRAKGKDLWGIREFEEAEGGIARRQNRISRRRRQREQVRIGLLKSYFAEEIEKVDPDFLQRLENSKYHLSDKDEKVRYKSAIFNDPEYTDKDYYRDYPTIFHLRAELIHNQEPHDIRLVYLALLNMFKHRGHFLNASLSAEEETQSMSDAYTAFRALVEEVMTANETENLFFPDGKADEIEAIISSRDYNRKRKSELMTEMLGFTKKDKAAQALIKGMCGLTVDVKTVFREIESEAKLSISFSDSNYDEKIVEIQEVLDDEQLELLEAVKTIYDIGSLAGVLKGEKYLSDARITDYNKHKEDLALLKKIIRKYTDQKTYNDLFRGTEPGSYSAYVNSTNSGKKQRRNMGGNAKRNQEAFYASLKKLLNKLPSEDDDVQKILADIDKELFLPKQLTFANGVIPNQVHAREMKAILNNAEQYLPFLTEKDESGLTVSERILKLFSFQIPYYVGPVTTKSSRDGGNGWVVRKESGQVLPWNIEDKIDMDATSKKFIENLIRECTYIAGEKVLPKGSLLYERYCVLNEINNIKIDGRPIDVELKQKIFEDKFMSGKKVTRKQLVTYLHGKGVLEDDAQLTGIDKTINNSLSSYGKFLGVFGDELKKDSCQIMVEDIIRDCTIYGDSKKRLRETLQKKYVDNNNLSESQLKRILGFKFKDWGRMSKEFLEMQGINRETGEVMSLVQAMWETNLNLMELIYSEDFTFAEALQEKQAKDYLTLSEFKFEDLDEYYFSAPVKRMVWQTLLIIKELEKVLGAPPKKVFIEMTRSDGVKGDRGRTISRKKQFEDLYKKIKDESQDWASIIDNADASGKLRSKKMYLYLTQMGKCMYTGKPIDLDDLFDDNKYDIDHIYPRHYVKDDNLGNNLVLVEKKANASKGDRYPLDTDIRGKMHGTWKFLKEKGLITEEKYRRLTGSNPFSEEQQADFIARQLVQTSQGTKGVADLLKQLLPDAKIAYSKASNVSDFRRDYDLPKSRLINDFHHANDAYLNIVVGNAYLVKFTQNPLNYIRSGDVQYNLGRMFEKDIVRNGEVAWLADDGKGNHGTIVTVKKVMARNTPMMTRMVLNGHGAIANATLYPASKASADNYIPLKGSDSKIADVTKYGGFTSVSTSRFVLVEHLVKKERIRTLEALPILVANSCKTMEDIENYCEEELGLIAPKVKLDGIKIQSLLKINGFYVHLSGKTNKQLALRNAVNLCLDAKWKEYIHYLEKASNNGNYGNPICSDMNIELYSILAEKHSSSIFAKRPNPVGTKLVKEKETFSKLELVDQVSVLLQILQLSAIGITQADLRAIGGAGIAGKMLISKDISKQEEALLIMQSPTGLYESTIDLKTI

SEQ ID NO: 3212 - protein, 1356 aa, Unknown
  Description of Unknown: uncultivated organism sequence
  Category: MG91 effectors
  Description: MG91-404 effector
MGRDYYLGLDMGTSSVGWAVTDEKYNLLRAKGKDLWGIREFEEAEGGIARRQNRISRRRRQREQVRIGLLKSYFAEEIEKVDPDFLQRLENSKYHLSDKDEKVRYKSAIFNDPEYTDKDYYRDYPTIFHLRAELIHNQEPHDIRLVYLALLNMFKHRGHFLNASLSAEEETQSMSDAYTAFRALVEEVMTANETENLFFPDGKADEIEAIISSRDYNRKRKSELMTEMLGFTKKDKAAQALIKGMCGLTVDVKTVFREIESEAKLSISFSDSNYDEKIVEIQEVLDDEQLELLEAVKTIYDIGSLAGVLKGEKYLSDARITDYNKHKEDLALLKKIIRKYTDQKTYNDLFRGTEPGSYSAYVNSTNSGKKQRRNMGGNAKRNQEAFYASLKKLLNKLPSEDDDVQKILADIDKELFLPKQLTFANGVIPNQVHAREMKAILNNAEQYLPFLTEKDESGLTVSERILKLFSFQIPYYVGPVTTKSSRDGGNGWVVRKESGQVLPWNIEDKIDMDATSKKFIENLIRECTYIAGEKVLPKGSLLYERYCVLNEINNIKIDGRPIDVELKQKIFEDKFMSGKKVTRKQLVTYLHGKGVLEDDAQLTGIDKTINNSLSSYGKFLGVFGDELKKDSCQIMVEDIIRDCTIYGDSKKRLRETLQKKYVDNNNLSESQLKRILGFKFKDWGRMSKEFLEMQGINRETGEVMSLVQAMWETNLNLMELIYSEDFTFAEALQEKQAKDYLTLSEFKFEDLDEYYFSAPVKRMVWQTLLIIKELEKVLGAPPKKVFIEMTRSDGVKGDRGRTISRKKQFEDLYKKIKDESQDWASIIDNADASGKLRSQKMYLYLTQMGKCMYTGKPIDLDDLFDDNKYDIDHIYPRHYVKDDNLGNNLVLVEKKANASKGDRYPLDTDIRGKMHGTWKFLKEKGLITEEKYRRLTGSNPFSEEQQADFIARQLVQTSQGTKGVADLLKQLLPDAKIAYSKASNVSDFRRDYDLPKSRLINDFHHANDAYLNIVVGNAYLVKFTQNPLNYIRSGDVQYNLGRMFEKDIVRNGEVAWLADDGKGNHGTIVTVKKVMARNTPMMTRMVLNGHGAIANATLYPASKASADNYIPLKGSDSKIADVTKYGGFTSVSTSRFVLVEHLVKKERIRTLEALPILVANSCKTMEDIENYCEEELGLIAPKVKLDGIKIQSLLKINGFYVHLSGKTNKQLALRNAVNLCLDAKWKEYIHYLEKASNNGNYGNPICSDMNIELYSILAEKHSSSIFAKRPNPVGTKLVKEKETFSKLELVDQVSVLLQILQLSAIGITQADLRAIGGAGIAGKMLISKDISKQEEALLIMQSPTGLYESTIDLKTI

SEQ ID NO: 3213 - protein, 1356 aa, Unknown
  Description of Unknown: uncultivated organism sequence
  Category: MG91 effectors
  Description: MG91-405 effector
MKTGNYYVGLDMGTNSVGWAVTDSKYNLIRAKGKDLWGIREFEEARTAADRRSKRVARRRRQRQQVMMGLIRSYFEDEINKIDSQFFQRLDNSFYYLEDKDNAIKDKNVLFNDKNYIDKDYFHEYPTIFHLRKSLIDGTARHDVRFVYLAIINMFKHRGHFLNASLDSDHAYIPMKEILSIFDETASALEKNTWPSLSDFSEQIDKILCDRKISKSKKTEKLNEILGLEKKDEFCEFVKVICGLKSNTAKLFKVEGDETEKKDICFSDAGFDDSLSEIMDVIGEENTELLNSMKNIYDCGVLGEILSGYSFLSEARVALYKKHGDDLKSLKRILKKYNMENEYDFLFREAEAGTYSSYVGSVNCDGNKQRRGMKGRSKEDFYKTVKKILDPLMKSHPQDQDIAFVLEEISKDTFMPKQLTSSNGVIPNQVHAIELKMILKNAEEYLSFLKNKDESGLTVSERIVQLFSYQIPYFIGPTSDKSEKSGGNGWVVRKEPGPVLPWNIEEKIDIGLTNEKFIEKLVRTCTYISGEKVLPKNSILYQKYVVLNEINNIRIDGEKISVELKQDIFNELFLKSNRVTRQKLIKYLNNRGCIQDETQISGLDIKINSGMSTYAKFYSLFGDKMKEDSYVQMAEEIIFLCTVYGDSKKYLRERLIQKCGDSLSEDEIKKIMTMKFSDWGRLSREYITLAGCDKTTGEECTLIGALWNTNLNAMELINNDQFTFHEVLESRRAKDLNTLKDFKSEDLADYYYSAPVKRMIWQTIQILREIESVMGCSPEKVFVEMARRPEDRPKRKDSRKQMFLELYKNIKDEDRNWKELIEREDETGRLRSKKMYLYLTQMGRDMYTGDPIDLDKLFDNNLYDIDHIYPRHYVKDDSIENNLVLVYKPQNANKSDIYPLEKTIRDKQYGFWKGLRNQKLISEEKFNRLVGTKPFTEDQLAGFIARQMVETQQGTKGVAELLGTLLEDSRIVYVKAGNVSDFRRKYGFPKSRIVNDFHHANDAYLNIVVGNVYDVKFTQNPLRFIKDEYLKDKSRNQYNLDKMFDRNIERNGKIAWKAPTEDGEQGTIVTVRRVISKNTPLMTRLSFVGHGQISDETLYGHDDAKAGVYIPFKSRDARLSNVERYGGYNKASIAYFFLVESDNKGKRERTLESVPIYLSGQIKTENDLINYCLNTLGLIKPSIRIAKIRIQSLVEKNGFRFHITGKTNDRLTTRSATSLYVGSDKQSYIHKIEKYIDTGVIEEIMTKEKNIELYDLLTEKHCSGVFSKRPNPVGEKLKLRKEKFKALELPDQLDVLNQVLTLSSIGKAEADLTKIDESKKTGVMLISKKISPEDPVILISQSAIGLYENRINMATV

SEQ ID NO: 3214 - protein, 1119 aa, Unknown
  Description of Unknown: uncultivated organism sequence
  Category: MG91 effectors
  Description: MG91-406 effector
MKQILSLDLGITSVGYSVIQEHETDKYSLIDYGVSMFDKPTDKDGNSKKLLHSQALSAKNLHKLRKKRKQNLASLFDQYHLANKQKLLEQERDNLYKNKWELRAKKVFEEKLSVDEIFTILYHIAKHRGYKSLDSGDLLEELCDSLGIETETAKPKKDDEKGQIKQALKSVEALYEEYPQKTVAQIIYELESKKENPIFRNHDNYNYMIRREYINDEIRKIIKAQIAFGAFRAIDDAFINDVIAVIDDQKESTNDLSLFGKCEYYPEYYVAHQYSLLSDIFKMYQAVANITFNKEKIKITKEQIALIAEDFLGKIKKGKSVKDIKYKDIRKVLKLDDDIKIFNKDDSYLNKGKKQENTITKFHFVDTLSKIDKSFVEDIFASDESYRLMREIFDVLHYQKSPKLIYEQLKNKISDEQVIIDLIRNKKGSSLNISSFAMLQLLPYLEEGLTLDEVKQKIGLQRQEDYAQYKKGIKYLHITSYEKDDELEINNHPIKYAVSAALRVVKHLHAEYGTFDEIKVESTRELSLGEKARKEIEKANRAFEKEIEQIVENAEYQKIAKSYGKNLRKYARKILMWEEQERLDIYSGKSIGITDIFSNSVDLDHIVPQSLGGLSVKHNFVLVHRDENLQKSNQLPMNYIKDTQAYTNRVEHLLREHKINWKKAKNLLATNLDEVFKDRLESKSLRATSYIEALTAQMLKRYYPFKDVQKLKDGSAVRHLQGRATSNIRKVLGVMTKSRETNIHHAIDAILIGVTSHSWLQKLSNTFRENFGCIDDEARKNIKKALPYMDGMEIKDLVKEIEEQYNSFGEDSIFYRDIWGKVKTVNFWVSKKPMSSKIHKDTIYAKKGDGIYTVRENIIAKFIGLKVIPMTSPEEFMKKFHKEILQKMYLFKTNPQDVICKLVEQRGEEIKELLWSFEFLDVKNKEQMSEAKTKLELLIHKDLLDNNGNVIRKVKFYQTNLTGFDVRGGLATKEKTFIGFRAYKEDSKLEYERIDVANVEKIQKTNDGSFKAYKNDIVFFIYNDGSFKGGRVVSYIKKSSGSKLCAFLNPRFPTASEYQPSSFCKIEKGKHSGAKQQSIGSAKGIIKLNLDTLGNIKSYQVLGNVESKILDEIKSIVSH

SEQ ID NO: 3215 - protein, 610 aa, Unknown
  Description of Unknown: uncultivated organism sequence
  Category: MG91 effectors
  Description: MG91-407 effector
MAKETFVLTLPLKVEKWQADILDKRYELLRQVYNMVQRKLIRQYIYFSQQKEFKDCRNDYKRLREFFASHPFHFRGINGKNGEPSDIKFPYTYESRSSNSGKRPSGGISDYVSKLWTHRIGEEKTLSNFGINSYILEELGLHIMKAWEKRLYDHSSSRVSFKDYGDINSFGSRYKKGNFAGFTINLEEKIITYNANGRQGRYADLIKLPIDFSRDKKYYAVSALKGGIDSLRKLIIVRRCIRGRHKYYLQLTIAGEKPQKGRTLGSGRVGIDIGPSTIAVSSLNGVHFEKLADKCDNIEHELYLVNRKLDRSRRASNPQNFNDDGTIKRISRQKGERRIWNESSRYKQLKQTRRELFRRQAEVRKQQHLEMANAMLSQGDTFIVENNPIDAWVRRAKETTKTKTGKNRCKKRYGKTVAHHAPAMFVSILENKVKSLGGRFYEVDPRNAATQFDFTNGEFTKHEVNERSITLSNGRTHQRDMLSAFNLQHLRPESKETKDYDIEQMQADYPFFCKLEAAEQKRFTETRYNERDALYYVGAYKKQLRRQPQKESVANRHNGGVGRKHCNTSLGSENAKITGNGFVRESIERVSQVPDECHLFVSDPIVLDGL

SEQ ID NO: 3216 - protein, 1122 aa, Unknown
  Description of Unknown: uncultivated organism sequence
  Category: MG91 effectors
  Description: MG91-408 effector
MKKILSLDLGITSIGYSVIEEFGNDRYSLIDYGVSMFDKATDKDGNSKKLLHSASTSTSKLYDLRKKRKKDLAQLFHNFGLGDKNSLLSQEKQNIYKNKWYLRCHKAFKEKLNINELFTIFYTLAKHRGYKSLDSSDLLEELCEKLNIPLETKTKKDDERGKIKKALKTIEELKQNSTKTVAQIIYEIELKKENPTFRNHDNYNYMIRREYIDQEIEKIIKTQKDFGLFDDKFDIDNFIEKLKDIITYQNPSTNDMRLFGNCEYYEDEKAAHQYSVISDIFKMYESVSNITFNTKPSIKITKEQINKIADDFFTKIKKGKNIADIKYKDIRKILALSDDTKIFNKDDSYISKGKKVEHTIIKFHFVNNLSKFDNSFIVENLNSLENLKEIFEVLQFEKDPTAIYEKLKDKIEDKQTIINLIKHKSGNSLNISAKAMVEFIPYFKDGLTTDKIKEKLELNRCEDYSKFYKGIKYLNIRQFEQDDNLDINNHPVKYVVSATLRVIKYLHIVCGTFDEIRVESTRELSQNEETKKAIEKANKELEKQINDIVQNKEYQNIAQHYGKNLQKYARKILLYEAQNRRDIYTGEGIEFEDIFTKKVDIDHIVPQSVGGLSVKHNLVLVFRDTNIQKSNQLPMNFVKDKQDFINRVEHLFSEHKINWKKRKNLLATNLDEIYKDTFESKSLRATSYIEALTAQILKRYYPFKDKEKQENGKAVSYIQGRATSNIRKILKVKTKTRDTNIHHAIDAILIGLTNQSWLQKLSNTFRENFGKIDEEARANIKKDMPIFEIIIDDEVKYLEPKELVELIEKNYNYDGENSIFYKDIWGKIKSVNFWVSKKPMVSKIHKDTIYSKKDDGIYTVRENIINHFINLKITPKTSSKKFEEEFNKKILNKMYLFKTNPKDAVCKAIIKRANDIKTLLDSFIDIDTKDKEAMNNAKTKLDELIHKDIPDNNGKPIRKIKFYQTNLTGFDVRGGLATKEKTFIGFKAQIINGKLNYTRIDVANIDKIKKENDNSFKVYKNDLVFFIYTDGTNKGGKIVSFLEDKRIAAFSNPRFPSSIGFQPHFFVTIFNGKANSHKQHSLNKAIGIIKLNLDILGNIKSYQKIGSCESELLEFIKKVIKD

SEQ ID NO: 3217 - protein, 1358 aa, Unknown
  Description of Unknown: uncultivated organism sequence
  Category: MG91 effectors
  Description: MG91-409 effector
MQETGKDYYLGLDMGTNSVGWAVTDENYVLMRAKGKDLWGIREFDEALTAVDRRTHRVARRRRQRETARIGLLKEYFHDAIAEADPNFYQRLDNSKYHEEDKDSAVKGKNGIFNDANYTDKDYFKQYPTIFHLRTELIESTEKHDVRLVYLALLNMFKHRGHFLNAGLSTESENTMDTAYHNFVETAAQTIECNFMETVDIEKIKEILGSRDYSRSKKAELVAQLLHVDSKNKVQMACIKCICGLKVTAAAIFGDKMAADEEKKTDICFSDFGYDEKVPVILETVGEENFELVLAMQEIYDIGSLAGIMKDSLYLSMARVKEYEQHGKDLKILKGVVKKYATKEEYDTLFRTMEEGTYSAYVNSVNTKKKSRRDVKKRTRDEFYGRLKKIISTMPQDDSDVLYIKDKMEKEAFLPKQLTASNGVIPNQIHAREMKKILQNAETYLPFLKEKDTSGLTVSERILKLFSFQIPYYVGPVSEKSKLNGGNGWVVRKEEGTVLPWNIEEKIDMTATSREFVERMVRRCSYLSDERVLPKGSLLYERFCVLNEINAIKVDGVKIPVEIKQDLYSKYFKKGKKVTRKKIAEFLIARGVIKEDQTELISGIDIAVNSTLSTYAKFYAIFGEKMEQDSYKKMVEQIVEWCTIYGDAKKFLEQKIKECYGNILTQEEIKRITGFKFRDWGRLSKEFLELSGCSKATGEVMPLISMMWETNDNLMELLDDNYYTYREALEEKQNNAFKLLADIEPEDLDEMYFSAPVKRMVWQTLCIIKELEKVLGKAPKRLFVEMTRNEQKDKKRTDSRKQQFLDLYKNIKDESRDWKELITRADENGTLKSKKMYLYLTQRGRCMYTGHPIDLEDLFKDNRYDIDHIYPRHFVKDDNIMNNLVLVEKEKNAHKSDNYPLEEEIYKKQLPVWKDLHQCKLITDEKFKRLTGRNEFTDEQKAGFIARQLVETSQGTKGVTTILERALPDTKIVYAKASNVSEFRQKRDLLKSRVVNDFHHAQDAYLNIVVGNVYFVKFTQNPLHFIKAEYDKNKAQYEYNLSRMFDRDVRRGNETAWIGCKKGEEAGTIVTVKKMMAKNTPMLTRLSFEGKGGLADQTLYSAEKAKGNGYIPLKTSDAKMQDVTKYGGFNSVSTAYFFLVEHELKGKKVRTLETVPIIWRDRIEKDETMLLKYCTDVLELKNPSIRVKKIKLQSYIKKDGYYMYITGKTNKQITTKNAVELCVNQRWIDYIKIIEKTVEKKKECEEVNYNKNVEFYDLLLTKHTQEIFSNRPNPVGAKLKQGRDKFLSLTLFEQSTVLYEILQLSIIGNTRADLHSIGGAPISGVMLLSKKITDSKEFILINQSVTGLFEQKVDLLTV

SEQ ID NO: 3218 - protein, 1122 aa, Unknown
  Description of Unknown: uncultivated organism sequence
  Category: MG91 effectors
  Description: MG91-410 effector
MKKILSLDLGITSIGYSVIIEEEIQRYSLLDYGVSMFDKPTDKDGNSKKLLHSQAISAKKLHQLRKERKKNLAKLFEKYNLASAAKLLGQEKKNIYIHKWQLRAKKVFEEKLSVEEIFTIFYHIAKHRGYKSLDSGDLLEELCVDLGIELEQKKEKKDDEKGKIKQALNNIESLRQEYPEKTVAQIIYDVELQKEQPVFRNHDNYNYMIRREHINDEIVTIISKQKEFGNFENIDSEAFIADLIAVIDDQKESTNDMSLFGKCEYYPKEYVAHQYSLLSDIFKMYQAVANITFNKEKIKISKEQIRLIAEDFLNKIKKGKSVKELKYKDVRKVLNLDDSIKIFNKEDSYQRAGKKVENTITKFHFVDTLFKIDKSFIEDIFSADESYALMREIFDVIHKEKSPKRIYEQLKDKVSSEAVIIDLIRYKKGSSLNISSYAMMKFLPYFEEGMTLDAIKEKLNLNRKEDYSEYKKGIKYLHISTYEKDDSLEINNHPVKYVVSAALRVVKHLHAKHGAFDEIKVESTRELSLNDKVKKEIEKVNKEREKEIEKIVSDKEYQTIAQDYGKNIHKYARKILMWEAQERFDIYSGQSIGLDDIFSNRVDIDHIIPQSLGGLYVQHNLVLVHRDENLQKSNQLPMNYIEDKEAYINRVEHLFSEHKINWKKRKNLLATNLDEIYKDTFESKDLRATSYIEALTANILKRYYPFTDEKKSADGSAVRHVQGRATSNIRKVLDVKTKSRESNIHHAVDALLIGVTNHSWLQKLSNTFRENFGKIDDEARQNIKKTLPYIDGVEVKDIVKEIEQNYNSLGEDSIFYKDIWGRVKTVSFWVSKKPMSSKAHKDTIYADKGDGIFTVRESIIAKFINLKITPTTSPEDFMKKFHKEILEKMYLYKTNPNDVICKIVEQRAEEIKELLWSFEFLDAKNKEEMQEAKAKLENLVHRELFDNNGNVIRKVKFYQTNLTGFKVRGGLATKEKTFIGFRAIKKGEKLEYERIDVSNFEKIKKSNDGSFKVYKNDIVFFIFDEENFKGGKIVSFLEDKTIASFSNPRFPAAIKFQPDSFCIIGKDSNGKPKKSSSKQYKLGKAKGIIKLKIDILGNIESYQVLGNAKSKLLDEIKSIVSH

SEQ ID NO: 3219 - protein, 1358 aa, Unknown
  Description of Unknown: uncultivated organism sequence
  Category: MG91 effectors
  Description: MG91-411 effector
MEKEYYLGLDMGTNSVGWAVTDDAYNLIRFKGKDMWGIREFDEANPAVERRTHRTSRRREQRNAVRMGLIRSYFADEIQKVDSNFYQRLDNSFFHVEDKQDNVKDKNGIFNDKNYKDADYYKQYPTIFHLRKELIEDASQKDVRLVYLAVANMFKHRGHFLLSGIGSESSKQTITDLYNQVTGLITEEYGISLKTDIAGTDFEQVLCSREYSRTRKSEKVCEILEIKNSDKLKKAFVKSMCGLSVKITDIIDDTFTEISDEDKKITFSFVDSDYDEKAGVLEEKLGTDVYDIISKLKEIHDKAQVAEIMKNYQYLSFARVADYEKHKKDLKILKRVVKKYFEPTVYDKLFRSEENGTYSAYVNSFNSEEKSRRNYKERKQEDLYNSIKKLLKSVDNVDDTDIEYIKNEMDKENFLPKQLTFKNGVIPNQIHASELKAILKNAEKYLPFLNEKDESGYTVSERILMLFSFQIPYYVGPVSSNSNGWVKRLEPGQVLPWNIDKKIDLKETSEQFIQRMVRNCTYIAGEKVLPKDSLLYENFKVLNEINNLSINGERITVNLKQDLYNTLFLKGKRVTRKQIFNYFHSRGLVEEDSQISGIDIAVNNSLSTYGKFLPLFGEHLKEDKYKKMVDDIVFWCTVYGDSRKFLREQLEEKYSDVLDENQIKRITGMKFKDWGNLSKEFLELSGCCKSTGEVMPLIRAMWETNYNLMELLHSEEFTYSEELEEKQGKIEKVLSEYTIDDLNEEYFSAPVKRMVWQTLLIIKEIEKIMKCPPTRIFVEMTRKDDEKGDNGRKSSRKDQLLALYKKIQSEDKEWKKEMSSRIEDYDKKGALRSKKLYLYFIQKGLDMYTGKPIDLDNLMSANSNYDIDHIYPRHFVKDDNINNNLVLASKPANAEKSDIYPIKDSIYQKMKYTWKVLRDEGLITEEKYKRLTGRNPFTDEQKAGFIARQLVETGQGTKGVADLLTALLPDTKLVYSKAGNVSDFRKKYDIPKSRLINDFHHAHDAYLNIVVGNIYFTKFTSNPLNYIRKECSSKDNKYQYNLGNMYKWDVKRDGKTAWIAAKEGETGTIATVKKMLSRNTPTLTRLTIEGHGGIADATLYSHKKAKQDAYIPLKSSDARMADVTKYGGYSSVTTAYLFLVEHEIKGKKIRTLETVPLYLKDRLENSKEKLEEYCRETLGYTNPSVRMKKIKLQSLIKLNGYYMQISGKTNKQFTVRNYVQFCLNSKWVDYIHKLEKYQDKGVIDDAITDEKNVELYNVLCEKHSVGIFTLRPNPVGDKIKKGYDKFVNLTTEEQIKLLIEIIKLTCVGIVSANLTLIGGASISGKMLISKNITDAKECLLINQSVTGLYENRIDLLRV

SEQ ID NO: 3220 - protein, 1117 aa, Unknown
  Description of Unknown: uncultivated organism sequence
  Category: MG91 effectors
  Description: MG91-412 effector
MAHMKKILSLDLGITSIGYSILDELENDRYSLLDYGVSMFDKPTDKDGNSKKLLHSASMSQTNLYNLRKKRKENLAQLFEEFSFGKKEDFLQQERENLHVNKWELRAKKAFQEKLEVSELFSILYLLAKHRGYKSLDSDDLLEELCQKLELHVDITKKKKDDERGKIKAALVNIEHLREQYPHKTVAQIIYEVEKSKQNPTFRNHDNYNYMIRREYINDEIKKIIKAQESFGLFNFTTDEFIAKLIATIDDQKEATIDPSLFGNCEYYPQEKVAHQYSLLSDIFKMYQSVANITFNKEKVKITPQQIHLVANDFFSKLKKGGKNIVDIKYKDIRKVLKLDENIKIFNKDDSYLNRGKKQEHTITKFHFVANLSKMDNTFIIEILEKANPYEIFREIFDVLAYEKAPQTIYDKLKDTIDDETIVSLIKYKNGKSLNISHYAMTRFLPFFEQGLSTDEIKKKLNLERKEDYSQYKKGIKYLHVKSFEHDENLEINNHPVKYVVSAVLRLIKHLHVNHGPFDEIRVESTRELSQNEQTKKDIVKANRALEKEIDVIIANEEYQKIAQHYGKNLRKYARKILMWEEQERFDIYSGKSIGFEDIFTNVVDLDHIVPRSVGGLSVKHNFVLAHRDINVQKSNRLPLDFVVDTEAFINRVEHLFAEHKINWKKKKNLLATTLDETFKDTFESKDLRATSYIEALSAQILKCYYPFTDKKKQHDGSAVRHIQGRATSNIRKLLHVKTKVRDTNIHHAIDAILIGLTNRSWLQKLSNTFRDNLGVIDDEARAKIKKEMPLIEGIEPKELVTMIEDAYNFYGEDSVFYKDVWGKIKVVNFWVSKKPMVSKIHKDTIYAKKEDGIYTVRESIIDKFAELKTTTTTDADTFMKSFEKNVLHKMYLHKTNPKDFTCKAVTNRADAIYELLKSFDSLDKKDKALMSEAKAKLDDLIHRDILDNNTNVIRKVKFFQTNLTGFNIRGGLATKEKTFIGFKAELKDDKLCYERIDVANFNTIKKENDKSFKAYKNDVIFFMYGDGSFRGGKIVSFLEDKKIAAFSNPKFPVSYKFQPDSFCKDKAHTGAKQHALNKAIGIIKLNLDITGKIKSYQSIGTIESELLQFIKEAIHG

SEQ ID NO: 3221 - protein, 603 aa, Unknown
  Description of Unknown: uncultivated organism sequence
  Category: MG91 effectors
  Description: MG91-413 effector
MAKENFVLTLPLRVDKCQADILDKRYELLRLIYNMVQQKLVRQYIYFSQQKAFKACESFEQKREFFNTHPFHFKGIKGKNGELCDIKFPYTYESRSSSSGKRPSGGISDYVSKLWSHKVGADKRLVDFGLNGSIMEELGLHVMKAWEDRLYKYKTKRVSFKGYGAINSLGCRYHKGNFAGFTINLEEGFITFNTNGRHGQFADIITLPIDFSREKKGYAAEAFKSGVDSLRKLIIVRRCIRGRNKYYLQLTISGEKPQKGRTLGKGNVGIDIGPSTIATSSLQGVHFDKLADKCDNIEHELYLINRKLDRSRRVNNPENYNPDGTIKRGVRLVWKKDKDVRRYASLKQQRKELYRKQAETRKQQHLEMANAILSQGDTFIVENNPIDAWVRRAKETKKNKTGKIRCKKRYGKSVANHAPAMFVSILKNKVQSLGGMFREVDPGYAATQFDFTNGVFTKHEVSERSITLSNGRTHQRDMLSAFNLQHIGQELKEYDIEQMQADYSIFCRLEAAEQERFKETRRNERDALYFVGAFAKELRHEPQEETVANRHNGGVGRKHCNTLCTENAKITGSGLVRESIERVSEAPEECHHIGNQPIILDGL

SEQ ID NO: 3222 - protein, 530 aa, Unknown
  Description of Unknown: uncultivated organism sequence
  Category: MG91 effectors
  Description: MG91-414 effector
MTSQSFVIELPIAVDDAEMRTIVRKLEFARQLHNATLGTAIGQLQQMRQDTAWKQACAMPKGKERTAAFRALDRKYGLTEYDLHSVIARHREGSGRKAELGINETQKIATRVFQAINRYKLGLGGMPRFKSSKRGLHSIEGKTNKTGLKFRPGKKVLNWCGHDYRVLIDPKDDYIQRALKENERSDQYRKIKYCRLVRKRIRSADRFFLQVVLEGTAPVKHVYAPVTERAAIDPGPQSIALFSKAFAGKIQVAGSNNFNEAASRRLLRAMDRSLRRNNPDAYNEDGTINKGAKLAKSKNYQRKVDQLHEMHRVAAAQRKCRHGQTINLLLSIAGDIRIEKNSWKAFQRGHFGKSLGKSAMSGFIAQLKSKAESAGLKVTEVNPYKLKLSQYDPYTDTYRKKDLSERWQEMKAGSGQYIQRDVLSALLLYCADIEKEIHIPKVAVEQLEGAKQLLTDAGYVVLKSTSSRDQRDPRLAPEPKAMTPEMARQKILRGAGDSHLPTDQALGRIRAGGKVSTWSKETFPLQRGVV

SEQ ID NO: 3223 - protein, 530 aa, Unknown
  Description of Unknown: uncultivated organism sequence
  Category: MG91 effectors
  Description: MG91-415 effector
MTSQSFVIELPIAVDDAEMRTIVRKLEFARQLHNATLGTAIGQLQQMRQDTAWKQACAMPKGKERTAAFRALDRKYGLTEYDLHSVIARHREGSGRKAELGINETQKIATRVFQAINRYKLGLGGMPRFKSSKRGLHSIEGKTNKTGLKFRPEKKVLNWCGHDYRVLIDPKDDYIQRALKENERSDKYRKIKYCRLVRKRIRSSDRFFLQVVLEGTAPVKHVYAPVTERAAIDPGPQSIALFSKEFAGKIQVAGSNNFNEAASRRLLRAMDRSLRRNNPDAYNENGTIKKGAKLVKSKNYQRKVDRLREMHRVAAAERKCRHGQTINLLLSIAGDIRIEKNSWKAFQRGHFGKSLGKSAMSGFIAQLKSKAASAGLKVTEVNPYKLRLSQYDPYTDTYRKKDLSERWQEMKAGSGLYIQRDVLSALLLYCADIEKEIHIPKVAVEQLEGAKQFLTDAGYVVLKSTSSRDQRDPRLAPEPKAMTPEMARQKILRGAGDSHLPTDQALGRIRAGGKVSTWSKETFPLQRGVV

SEQ ID NO: 3224 - protein, 530 aa, Unknown
  Description of Unknown: uncultivated organism sequence
  Category: MG91 effectors
  Description: MG91-416 effector
MPSQSFVIELPIAVDDAEMRTIVRKLEFARQLHNATLGTAMGQLQQMRQDAAWKEACVMPKGKERAAAFRALDRKYGLTEYDLHSVIARHREGSGRKAELGINETQKIATRVFQAINRYKLGLGGMPRFKSSKRGLHSIEGKTNKTGLKFRPEKKVLNWCGHDYRVLIDPKDDYIQRALKENERSDKYRKIKYCRLVRKRIRSSDRFFWQVVLEGTAPVKHVYAPVTERAAIDPGPQSIALFSKAFAGKIQVAGSNNFNEAASRRLLRAMDRSLRRNNPDAYNENGTIKKGAKLVKSKNYQRKVDRLREMHRVAAAERKCRHGQTINLLLSIAGDIRIEKNSWKAFQRGHFGKSLGKSAMSGFIAQLKSKAASAGLKVTEVNPYKLRLSQYDPYTDTYRKKDLSERWQEMKAGSGLYIQRDVLSALLLYCADIEKEIHIPKVAVEQLEGAKQFLTDAGYVVLKSTSSRDQRDPRLAPEPKAMTPEMARQKILRGAGDSHLPTDQALGRIRAGGKVSTWSKETFPLQRGVV

SEQ ID NO: 3225 - protein, 530 aa, Unknown
  Description of Unknown: uncultivated organism sequence
  Category: MG91 effectors
  Description: MG91-417 effector
MTSPSFVIELPIAVDDAEMRTIVRKLEFARQLHNATLGTAMGQLQLMRQDAAWKEACVMPKGKERAAAFRALDRKYGLTEYDLHSVIARHREGTGRKAELGINETQKIATRVFQAINRYKLGLGGMPRFKSFKRGLHSIEGKTNKTGLKFKPEQKVLNWCGHDYRVLIDPKDDYIQRALKDNERSDQYRKIKYCRLVRRRIRSADRFFLQVVLEGTAPVKHVYAPVTERAAIDPGPQSIALFSKAFAGKIQVAGSNNFNEAASRRLLRAMDRSLRRNNPDAYNEDGTINKGVKLAKSKNYQRKVDQLHEMHRVAAVQRKCRHGQTINLLLSIAGDIRIEKNSWKAFQRGHFGKSLGKSAMSGFIAQLKSKAESAGLKVTEVNPYKLKLSQYDPYTDTYRKKDLSERWQEMKAGSGQYIQRDVLSALLLYCADIEKEIHIPKAAVEQLEGAKQLLTDAGYVVLKSTSSRDQRDPRLAPEPKAMTPEMARQKILRGAGDSHLPTDQALGRIRAGEKVSTWSKETFPLQRGVV

SEQ ID NO: 3226 - protein, 497 aa, Unknown
  Description of Unknown: uncultivated organism sequence
  Category: MG91 effectors
  Description: MG91-418 effector
MTSPTFIIELPIRVSDSESRTILRKLEFARQLHNATLGTALGQLQQLRQDSEWEKACLMPKGKERSELFRKLDRKYQLTEYDLHTVIAKHRQRSGRKTELGINETQKIATRVFQAVNRYKLGLGGRPRFKSLSRGLRSIEGKSNKTGLKFNIEKSVLSWCKHDYCVFIDPQDDFLQRALRSEGRSGFKKVKYCRLVRKTIKGKNRFYLQVVLEGQAPIKHIYASTSERLSIDPGPQTIAVFSDVWAGKIKVSPTAQVDEKRLRCIQRSMDRSLRKSNPDCYESDGTLRKGCVLKKTKGYEKRIQRLQECHRKAAATRRCEHGQLINLLLSMAGDIRVEKNQWKAFQRGHFGKSLGKSGISGFIERLKSKAESAGLKVTEVKPYKLKLSQYDPYTDQYRKKSLNERWHSLGESSEWIQRDVMSALLLQCADLEEEKHIPTEVIKTLEGVKQLLRDAGYVILKPSSNGESNPTFASEPKAVTPEKVRLEIFCGASDSYL

SEQ ID NO: 3227 - protein, 444 aa, Unknown
  Description of Unknown: uncultivated organism sequence
  Category: MG91 effectors
  Description: MG91-419 effector
MQGTGKAAGRKAELGINETQKIATRVFQAINRYKLGLGGMPRFKSSKRGLHSIEGKTNKTGLKFRPEKKVLNWCGHDYRVLIDPKDDYIQRALKENERSDKYRKIKYCRLVRKRTRSSDRFFLQVVLEGAAPVKHVYAPVTERAAIDPGPQSIALFSKAFAGKIQVAGSNNFNEAASRRLLRAMDRSLRRNNPDAYNEDGTIKKGAKLAKSKNYQRKVDQLHEMHRVAAAQRKCRHGQTINLLLSIAGDIRIEKNSWKAFQRGHFGKSLGKSAMSGFIAQLKSKAASAGLKVTEVNPYKLKLSQYDPYTDTYRKKDLSERWQEMKAGRGQYIQRDVLSALLLYCADIEKEIHIPKVAVEQLEGAKQFLTDAGYVVLKSTSSRDQRDPRLASEPKAMTPEMARQKILRGAGDSHLPTDQELGQIRAGGKVSTWSKETFPLQRGVV

SEQ ID NO: 3228 - protein, 530 aa, Unknown
  Description of Unknown: uncultivated organism sequence
  Category: MG91 effectors
  Description: MG91-420 effector
MPSQSFVIELPIAVDDAEMRTIVRKLEFARQLHNATLGTAMGQSQQMRQDAAWKEACVMPKGKERAAAFRALDRKYGLTEYDLHSIIARHREGSGRKAELGINETQKIATRVFQAINRYKLGLGGMPRFKSSKRGLHSIEGKTNKTGLKFRPEKKVLNWCGHDYRVLIDPKDDYIQRALKENERSDKYRKIKYCRLVRKRIRSSDRFFWQVVLEGTAPVKHVYAPVTERAAIDPGPQSIALFSKAFAGKIQVAGSNNFNEAASRRLLRAMDRSLRRNNPDAYNENGTIKKGAKLVKSKNYQRKVDRLREMHRVAAAERKCRHGQTINLLLSIAGDIRIEKNSWKAFQRGHFGKSLGKSAMSGFIAQLKSKAASAGLKVTEVNPYKLRLSQYDPYTDTYRKKDLSERWQEMKAGSGLYIQRDVLSALLLYCADIEKEIHIPKVAVEQLEGAKQFLTDAGYVVLKSTSSRDQRDPRLAPEPKAMTPEMARQKILRGAGDSHLPTDQALGRIRAGGKVSTWSKETFPLQRGVV

SEQ ID NO: 3229 - protein, 530 aa, Unknown
  Description of Unknown: uncultivated organism sequence
  Category: MG91 effectors
  Description: MG91-421 effector
MTSPSFVIELPIAVDDAEMRTIVRKLEFARQLHNATLGTAMGQLQLMRQDAAWKEACVMPKGKERAAAFRALDRKYGLTEYDLHSVIARHREGTGRKAELGINETQKIATRVFQAINRYKLGLGGMPRFKSFKRGLHSIEGKTNKTGLKFKPEQKVLNWCGHDYRVLIDPKDDYIQRALKDNERSDQYRKIKYCRLVRRRIRSADRFFLQVVLEGTAPVKHVYAPVTERAAIDPGPQSIALFSKAFAGKIQVAGSNNFNEAASRRLLRAMDRSLRRNNPDAYNENGTIKKGAKLVKSKNYQRKVDRLREMHRVAAAERKCRHGQTINLLLSIAGDIRIEKNSWKAFQKGHFGKSLGKSAMSGFIAQLKSKAESAGLKVTEVNPYKLKLSQYDPYTDTYRKKDLSERWQEMKAGSGQYIQRDVLSALLLYCANIEKEIHIPKVAVEQLEGAKQFLTDAGYVVLKSTSSRDQRDPRLAPEPKAMTPEMARQKILRGAGDSHLPTDQELGRIRAGGKVSTWSKETFPLQRGVV

SEQ ID NO: 3230 - protein, 497 aa, Unknown
  Description of Unknown: uncultivated organism sequence
  Category: MG91 effectors
  Description: MG91-422 effector
MTSPTFIIELPIRVSDSESRTILRKLEFARQLHNATLGTALGQLQQLRQDSEWEKACLMPKGKERSELFRKLDREYQLTEYDLHTVIAKHRQRSGRKTELGINETQKIATRVFQAVNRYKLGLGGRPRFKSLSRGLRSIEGKSNKTGLKFNIEKSVLSWCKHDYCVFIDPQDDFLQRALRSEGRSGFKKVKYCRLVRKTIKGKNRFYLQVVLEGQAPIKHIYASTSERLSIDPGPQTIAVFSDVWAGKIKVSPTAQVDEKRLRCIQRSMDRSLRKSNPDCYESDGTLRKGCVLKKTKGYEKRIQRLQECHRKAAATRRCEHGQLINLLLSMAGDIRVEKNQWKAFQRGHFGKSLGKSGISGFIERLKSKAESAGLKVTEVKPYKLKLSQYDPYTDQYRKKSLNERWHSLGESSEWIQRDVMSALLLQCADLEEEKHIPTEVIKTLEGVKQLLRDAGYVILKPSSNGESNPTFASEPKAVTPEKVRLEIFCGASDSYL

SEQ ID NO: 3231 - protein, 530 aa, Unknown
  Description of Unknown: uncultivated organism sequence
  Category: MG91 effectors
  Description: MG91-423 effector
MTSQSFVIELPIAVDDAEMRTIVRKLEFARQLHNATLGTAMGQLQQMRQDAAWKEACVMPKGKERAAAFRALDRKYGLTEYDLHSVIARHREGSGRKAELGINETQKIATRVFQAINRYKLGLGGMPRFKSSKRGLHSIEGKTNKTGLKFRPEKKVLNWCGHDYRVLIDPKDDYIQRALKENERSDKYRKIKYCRLVRKRIRSADRFFLQVVLEGTAPVKHVYAPVTERAAIDPGPQSIALFSKAFAGKIQVAGSNNFNEAASRRLLRAMDRSLRRNNPDAYNEDGTIKKGAKLVKSKNYQRKVDRLREMHRVAAAERKCRHGQTINLLLSIAGDMRIEKNSWKAFQRGHFGKSLGKSAMSGFIAQLKSKAASAGLKVTEVNPYKLKLSQYDPYTDTYRKKDLSERWQEMKAGSGQYIQRDVLSALLLYCADIEKEIHIPKVAVEQLEGAKQLLTDAGYVVLKSTSSRDQRDPRLAPEPKAMTPEMARQKILRGAGDSHLPTDQALGRIRAGGKVSTWSKETFPLQRGVV

SEQ ID NO: 3232 - protein, 530 aa, Unknown
  Description of Unknown: uncultivated organism sequence
  Category: MG91 effectors
  Description: MG91-424 effector
MTSPSFVIELPIAVDDAEMRTIVRKLEFARQLHNATLGTAMGQLQQMRQDAAWKEACVMPKGKERAAAFRALDRKYGLTEYDLHSVIARHREGTGRKAELGINETQKIATRVFQAINRYKLGLGGMPRFKSFKRGLHSIEGKTNKTGLKFKPEQKVLNWCGHDYRVLIDPKDDYIQRALKDNERSDQYRKIKYCRLVRRRIRSADRFFLQVVLEGTAPVKHVYAPVTERAAIDPGPQSIALFSKAFAGKIQVAGSNNFNEAASRRLLRAMDRSLRRNNPDAYNEDGTINKGVKLAKSKNYQRKVDQLHEMHRVAAVQRKCRHGQTINLLLSIAGDIRIEKNSWKAFQRGHFGKSLGKSAMSGFIAQLKSKAESAGLKVTEVNPYKLKLSQYDPYTDTYRKKDLSERWQEMKAGSGLYIQHDILSALLLYCADIEKEIHIPKVAVEQLEGAKQFLTDAGYVVLKSTSSRDQRDPRLASEPKAMTPEMARQKILRGAGDSHLPTDQELDRIRAGGKVSTWSKETFPLQRGVV

SEQ ID NO: 3233 - protein, 525 aa, Unknown
  Description of Unknown: uncultivated organism sequence
  Category: MG91 effectors
  Description: MG91-425 effector
MTSQSFVIELPIAVDDAEMRTIVRKLEFARQLHNATLGTAMGQLQQMRQDAAWKEACVMPKGKERAAAFRALDRKYGLTEYDLHSVIARHREGSGCKAELGINETQKIATRVFQAINRYKLGLGGMPRFKSSKRGLHSIEGKTNKTGLKFRPEKKVLNWCGHDYRVLIDPKDDYIQRALKENERSDKYRKIKYCRLVRKRIRSADRFFLQVVLEGTAPVKHVYAPVTERAAIDPGPQSIALFSKAFAGKIQVAGSNNFNEAASRRLLRAMDRSLRRNNPDAYNEDGTIKKGAKLVKRKNYQRKVDRLREMHRVAAAERKCRHGQTINLLLSIAGDIRIEKNSWKAFQRGHFGKSLGKSAMSGFIAQLKSKAASAGLKVKEVNPYKLKLSQYDPYTDTYRKKDLSERWQEMKAGSGQYIQRDILSALLLYCADIEKEIHIPKVAVEQLEGAKQFLTDAGYVVLKSTSSRDQRDLRLAPEPKAMTPEMARQKILRGAGDSHLPTDQALGRIRAGGKVSTWSKETFPL

SEQ ID NO: 3234 - protein, 530 aa, Unknown
  Description of Unknown: uncultivated organism sequence
  Category: MG91 effectors
  Description: MG91-426 effector
MTSPSFVIELPIAVDDAEMRTIVRKLEFARQLHNATLGTAMGQLQLMRQDAAWKEACVMPKGKERAAAFRALDRKYGLTEYDLHSVIARHREGTGRKAELGINETQKIATRVFQAINRYKLGLGGMPRFKSFKRGLHSIEGKTNKTGLKFKPEQKVLNWCGHDYRVLIDPKDDYIQRALKDNERSDQYRKIKYCRLVRRRIRSADRFFLQVVLEGTAPVKHVYAPVTERAAIDPGPQSIALFSKAFAGKIQVAGSNNFNEAASRRLLRAMDRSLRRNNPDAYNEDGTINKGVKLAKSKNYQRKVDRLHEMHRVAAAQRKCRHGQTINLLLSIAGDIRIEKNSWKAFQRGHFGKSLGKSAMSGFIAQLKSKAESAGLKVTEVNPYKLKLSQYDPYTDTYRKKDLSERWQEMKAGSGQYIQRDVLSALLLYCADIEKEIHIPKAAVEQLEGAKQLLTDAGYVVLKSTSSRDQRDPRLAPEPKAMTPEMARQKILRGAGDSHLPTDQALGRIRAGEKVSTWSKETFPLQRGVV

SEQ ID NO: 3235 - protein, 1047 aa, Unknown
  Description of Unknown: uncultivated organism sequence
  Category: MG91 effectors
  Description: MG91-427 effector
MTAFKYYLGLDMGTNSVGWAATDPEYRLLKAKGKDLWGIREFNEASGAVERRTHRISRRRRQREQVRIGILKDYFHDAICEVDPSFFRRLENSKYHEEDKDVEVRYKNNIFNDGNYTDKDYFNEYPTIYHLRNELISSTEKHDVRLVFLALLNMFKHRGHFLNAGLGENNGESNIDNAYFELTELLSELTEYHLSQDIDCKQIEAILSRRDMSRTHKAEELAGVLHVDLKNKPYKELIRGLCGLKFNACVVFPDVQSEEVTKLDICLSESSFDEKSDEIANIIGEDYFEIIMAMKEMFDIGSLASIMKGHNYLSQARVASYTKHKEDLKLLKEVIKKYCGKKEYDKFFNSDADGSYASYVGSYNSKNKERRVGNKRTSEELYKEIKKLLKDAPKEDENVQKILTSIENETFLPKQLTASNGVIPNQVHAREMKKILSNAENYLPFLTEKDETGLSVSERILKLFTFQIPYYVGPTSENSGKNGGNGWVVRREDGQVLPWNIDEKIDMKATSEAFISRMVRRCTYISGEQVLPKASLEYQSYCVLNEINNIKIDGERISVELKQDIYKAVFQKGKKVTKKQLCKYLHTRGIIETEEQVTGVDVSINNALTTYGKFKPIFGEDISKDSVQKMIEDIVFWCTVYGDSKKFLKDRIEEKYGNKLSEEQIKRILGFKFKDWGNLSKKFLELNGADTSTGESISIIRALWNNNLNLMELINSSLYNYKECLAEYQNTMLKTLSEIEAEDLNEYYFSAPVRRIIWQTILVIKELVKVLGCEPERIFVEMTRKPDEHKTRTSSRRNKFEELYKKVKDEATDWMQVIAKAEEDGKIRSKKMYLYLTQKGRCMYTGKHIELDDLFDKNLYDIDHIYPRHFVKDDNIDNNLVLVCKEKNAHKSDHYPIEEEIFLSQKKMWLELRKSGFITEEKYNRLMGRSPFSDEQKAGFIARQLVETSQGTKGVANILRQLLPGSKIVYAKASNVCPTGKIGLLSSMFTNPDYRRKGIAKELLSRVVNDAREYGCGTVQITASDMGVKLYTDFGFVHNDNFMQYKI

SEQ ID NO: 3236 - protein, 412 aa, Unknown
  Description of Unknown: uncultivated organism sequence
  Category: MG91 effectors
  Description: MG91-428 effector
MIAKHRQRSGRKTELGINETQKIATRVFQAVNRYKLGLGGRPRFKSLSRGLRSIEGKSNKTGLKFNIEKSVLSWCKHDYCVFIDPQDDFLQRALRSEGRSGFKKVKYCRLVRKTIKGKNRFYLQVVLEGQAPIKHIYASTSERLSIDPGPQTIAVFSDVWAGKIKVSPSAQVDEKRLRCIQRSMDRSLRKSNPDCYESDGTLRKGCVLKKTKGYEKRIQRLQECHRKAAATRRCEHGQLINLLLSMAGDIRVEKNQWKAFQRGHFGKSLGKSGISGFIERLKSKAESAGLKVTEVKPYKLKLSQYDPYTDQYRKKSLNERWHSLGESSEWIQLDVMSALLLQCADLEEEKHIPTEVIKTLEGVKQLLRDAGYVILKPSSNGESNPTFASEPKAVTPEKVRLEIFCGASDSYL

SEQ ID NO: 3237 - protein, 637 aa, Unknown
  Description of Unknown: uncultivated organism sequence
  Category: MG91 effectors
  Description: MG91-429 effector
MLTKELRQEALKKGLHYPKVENSVEFYITKNLMIYDFVNENRISMLRVCIAEKKAGIYDTFTKTWADCLLSSFLGKAGISVSERLAFALSAEAKKRLSSGQENFDYLALYKIDQQISYAKNWEKRHTADERKKEISQIMAGTNKRLSAGFTKFNHSLFGDCKRIMYSKSEKAVYCPECESISRISSPPKKGSLYRCPVCRFTAKVSQAENPLTEVHWSCIVQPAGKRSIIRYFCNDFSLQFGKCKIASEEKFRTILEADGSRIELMQTGNGWEDYKEKRYGLYNPSKRDVPYDMYLYGNVKAIQKISAYEHSMLDVWVKQHKNKKNELYTVYLIENYISQYAKNEIFEKLLKCGLNHIAHEAAFHNYNCTFNFNGNKIEDFLNIKMASLEQLRRIINDPFERDIIAMRYLDKNNLYLKDEELKKFLSLNVSNDMKEKIVRFCKFKKVTFYKVNKYVTENADWSSYFDYIGWTEELKYKKSDSVYYPKDFFKTHDRVFKELEEKKDAIQRKKDKEISKKIADLWEQRMQIPQYHYENNDLFVMMPHGTSDLKKEGRSLNHCVADYKEFVAEEKTQIFFIRKKAAPQKSFYTLEIKNHEIEQCHGRNNVDMTEGIRSFAYGFLKQLNTIKENPAVRAAA

SEQ ID NO: 3238 - protein, 497 aa, Unknown
  Description of Unknown: uncultivated organism sequence
  Category: MG91 effectors
  Description: MG91-430 effector
MPSPTFIIELPIRVSDSESRTILRKLEFARQLHNATLGTALGQLRQLRQDSEWKKACQMSKGKQRSELFRKLDRKYQLSEYDLHAVIANHRQSSGRKAELGINETQKIATRVFQAVNRYKLGLGGRPRFKSLSRGLRSIEGKSNKTGLKFNIEKSVLSWCKHDYRVFIDPRDDYVQRALHSEDRGGFKKIKYCRLVRKTIKGKNRFYLQVVLEGQAPIKHIYASTSERLSIDPGPQTIAVFTEVWAGKIKVSPTAQVDEKRLCCIQRSMDRSLRKSNPDCYESDGTLRKGCVLKKTKGYEKRIQRLQECHRKAAATRRCEHGQLINLLLSMAGDIRVEKNQWKAFQKGHFGKSLGKSGISGFIERLKSKAESAGLKVTEVKPYKLKLSQYDPYTDQYRKKSLNERWHSLGESSEWIQRDVMSALLLQCADLEEEKHIPTEVIKTLEGVKQLLRDAGYVILKPSSNEESNPTFASEPKAVTPEKVRLEIFCGASDSYL

SEQ ID NO: 3239 - protein, 530 aa, Unknown
  Description of Unknown: uncultivated organism sequence
  Category: MG91 effectors
  Description: MG91-431 effector
MTSPSFVIELPIAVDDAEMRTIVRKLEFARQLHNATLGTAMGQLQQMRQDAAWKEACVMPKGKERAAAFRALDRKYGLTEYDLHSVIARHREGTGRKAELGINETQKIATRVFQAINRYKLGLGGMPRFKSFKRGLHSIEGKTNKTGLKFKPEQKVLNWCGHDYRVLIDPKDDYIQRALKDNERSDQYRKIKYCRLVRRRIRSADRFFLQVVLEGTAPVKHVYAPVTERAAIDPGPQSIALFSKEFAGKIQVAGSNNFNEAASRRLLRAMDRSLRRNNPDAYNENGTIKKGAKLVKSKNYQRKVDRLREMHRVAAAERKCRHGQTINLLLSIAGDIRIEKNSWKAFQRGHFGKSLGKSAMSGFIAQLKSKAASAGLKITEVNPYKLRLSQYDPYTDTYRKKDLSERWQEMKAGSGLYIQRDVLSALLLYCADIEKEIHIPKVAVEQLEGAKQFLTDAGYVVLKSTSSRDQRDPRLASEPKAMTPEMARQKILRGAGDSHLPTDQELGQIRAGGKVSTWSKETFPLQRGVV

SEQ ID NO: 3240 - protein, 537 aa, Unknown
  Description of Unknown: uncultivated organism sequence
  Category: MG91 effectors
  Description: MG91-432 effector
MSTKSFIISLPIITGGQDRRRLRKSFSFGCNLQNAVMGGGWDRVLQMRATAEWQATRAMPKGRERTKAFRDLRVRFRLSEYDFHADVAKHRKASGRGHLLGINECQKLASRAWISVERHLYNGGAPRFISSRRGLHSIEGKTNRTGIIWKADQQCVTVCKHVYRVRVDKRDDWLTRALQDPTDPTKPRKVKYCRIVREMRKGKERFFLQLVAEGSSPLKHAYAGKDLRMAIDPGLGSLTYATEDGTIAKVQIAPSADTDHRAIRRIQRAMERSRRATNPDNYEAVDVVRHGKKKKSFKVKSGRLQWRFSKRYESLRAELAEIFRLSAATRKREHGEVCNWLLGHAGHIIVEDNSYKAFQRGRFGKTIGRHAPAALYAQLTNKAESAGLLVEVVSPKKLKPTQHNLLTGQFVKHELWERRVRLGEDDDERWIDRDAAACLNLLYADIENQTYAPERIREAVLAGVTAWLDAGVVVIQAREGITEREFGRFRRRGIPSLTVQGLRQQGFRGRSDSKSGATPRRKASTVSKPSHFSGEVV

SEQ ID NO: 3241 - protein, 537 aa, Unknown
  Description of Unknown: uncultivated organism sequence
  Category: MG91 effectors
  Description: MG91-433 effector
MSTKSFIISLPIITGGQDRRRLRKSFSFGCNLQNAVMGGGWDCVLKMRATPEWQAARAMPKGSERTKAFRDLRMRFRLSEYDFHADVAKHRKASGRGHLLGINECQKLASRAWISVERHLYNGGSPRFISSRRGLHSIEGKTNRTGIIWKADQQCVTVCKHVYRVRVDKRDDWLTRALQDPTDPKKPRKVKYCRIVREMRKGKERFLLQLVAEGTSPLKHAYAGKDLRMAIDPGLGSLTYATEDGTIAKVQIAPSADTDHRAVRKLQRAMERSRQATNPDNYETVEVVRHGKKHKSLKVKSGRLQWRFSKRYEKLRSELAEMLRLCAATRKREHGEVCNWLLGHAGHIIVEDNSYKAFQRGRFGKTIGRHAPAALYAQLTNKAESAGLLVEVVSPKKLKPSQHNLLTDTFVKHELWERRVRLGNDDDDRWIDRDAAACLNLLYADLEKQTYAPERIREAVLAGVTAWLDAGVVVIQAREGITEREFGRFRRRGIPSLTVQGLRQQGFRGRSDSKSGATPRRKASTVSKPSHFSGEVV

SEQ ID NO: 3242 - protein, 497 aa, Unknown
  Description of Unknown: uncultivated organism sequence
  Category: MG91 effectors
  Description: MG91-434 effector
MTSPTFIIELPIRVSDSESRTILRKLEFARQLHNATLGTALGQLQQLRQDSEWDKACLMPKGKERSELFRKLDRKYQLTEYDLHTVIAKHRQRSGRKTELGINETQKIATRVFQAVNRYKLGLGGRPRFKSLSRGLRSIEGKSNKTGLKFNIEKSVLSWCKHDYRVFIDPQDDYLQRALRSEGRSGFKKVKYCRLVRKTIKGKNRFYLQVVLEGQAPIKHIYASTSERLSIDPGPQTIAVFSDVWAGKIKVSPTAQVDEKRLRCIQRSMDRSLRKSNTDCYESDGTLRKGCVLKKTKGYEKRIQRLQECHRKAAATRRCEHGQLINLLLSMAGDIRVEKNQWKAFQRGHFGKSLGKSGISGFIERLKSKAESAGLKVTEVKPYKLKLSQYDPYTDQYRKKSLNERWHSLGESSEWIQRDVMSALLLQCADLEEEKHIPTEVIKTLEGVKQLLRDAGYVILKPSSNGESNPTFASEPKAVTPEKVRLEIFCGASDSYL

SEQ ID NO: 3243 - protein, 525 aa, Unknown
  Description of Unknown: uncultivated organism sequence
  Category: MG91 effectors
  Description: MG91-435 effector
MTSQSFVIELPIAVDDAEMRTIVRKLEFARQLHNATLGTAMGQLQQMRQDAAWKEACVMPKGKERAAAFRALDRKYGLTEYDLHSVIARHREGSGRKAELGINETQKIATRVFQAINRYKLGLGGMPRFKSSKRGLHSIEGKTNKTGLKFRPEKKVLNWCGHDYRVLIDPKDDYIQRALKENERSDQYRKIKYCRLVRKRIRSADRFFLQVVLEGTAPVKHVYAPVTERAAIDPGPQSIALFSKAFAGKIQVAGSNNFNEAASRRLLRAMDRSLRRNNPDAYNEDGTIKKGAKLVKSKNYQRKVDRLREMHRVVAAERKCRHGQTINLLLSIAGDIRIEKNSWKAFQRGHFGKSLGKSAMSGFIAQLKSKAASAGLKVTEVNPYKLKLSQYDPYTDTYRKKDLSERWQEMKAGSGQYIQRDILSALLLYCADIEKEIHIPKVAVEQLEGAKQFLTDAGYVVLKSTSSRDQRDLRLAPEPKAMTPEMARQKILRGAGDSHLPTDQALGRIRAGGKVSTWAKETFPL

SEQ ID NO: 3244 - protein, 530 aa, Unknown
  Description of Unknown: uncultivated organism sequence
  Category: MG91 effectors
  Description: MG91-436 effector
MTSPSFVIELPIAVDDAEMRTIVRKLEFARQLHNATLGTAMGQLQLMRQDAAWKEACVMPKGKERAAAFRALDRKYGLTEYDLHSVIARHREGTGRKAELGINETQKIATRVFQAINRYKLGLGGMPRFKSFKRGLHSIEGKTNKTGLKFKPEQKVLNWCGHDYRVLIDPKDDYIQRALKDNERSDQYRKIKYCRLVRRRIRSADRFFLQVVLEGTAPVKHVYAPVTERAAIDPGPQSIALFSKAFAGKIQVAGSNNFNEAASRRLLRAMDRSLRRNNPDAYNEDGTINKGVKLAKSKNYQRKVDQLHEMHRVAAVQRKCRHGQTINLLLSIAGDIRIEKNSWKAFQRGHFGKSLGKSAMSGFIAQLKSKAESAGLKVTEVNPYKLKLSQYDPYTDTYRKKDLSERWQEMKAGSGQYIQRDVLSALLLYCANIEKEIHIPKVAVEQLEGAKQFLTDAGYVVLKSTSSRDQRDPRLASEPKAMTPEMARQKILRGAGDSHLPTDQELGQIRAGGKVSTWSKETFPLQRGVV

SEQ ID NO: 3245 - protein, 530 aa, Unknown
  Description of Unknown: uncultivated organism sequence
  Category: MG91 effectors
  Description: MG91-437 effector
MTSPSFVIELPIAVDDAEMRTIVRKLEFARQLHNATLGTAMGQLQLMRQDAAWKEACVMPKGKERAAAFRALDRKYGLTEYDLHSVIARHREGTGRKAELGINETQKIATRVFQAINRYKLGLGGMPRFKSFKRGLHSIEGKTNKTGLKFKPEQKVLNWCGHDYRVLIDPKDDYIQRALKDNERSDQYRKIKYCRLVRRRIRSADRFFLQVVLEGTAPVKHVYAPVTERAAIDPGPQSIALFSKAFAGKIQVAGSNNFNEAASRRLLRAMDRSLRRNNPDAYNEDGTINKGVKLAKSKNYQRKVDRLHEMHRVAAAQRKCRHGQTINLLLSIAGDIRIEKNSWKAFQRGHFGKSLGKSAMSGFIAQLKSKAASAGLKVTEVNPYKLRLSQYDPYTDTYRKKDLSERWQEMKAGSGQYIQRDVLSALLLYCADIEKEIHIPKVAVEQLEGAKQFLTDAGYVVLKSTSSRDQRDPRLAPEPKAMTPEMARQKILRGAGDSHLPTDQELGRIRAGGKVSTWSKETFPLQRGVV

SEQ ID NO: 3246 - protein, 538 aa, Unknown
  Description of Unknown: uncultivated organism sequence
  Category: MG91 effectors
  Description: MG91-438 effector
MTTQTFILELPIKADDSQSRTISKKFEYGRMLYNATLGSGLGRLTQMRQDPEWRCACEMSKGKERNELFRRLNRQYRLTEYDFHSDIARHREGTKRKSELGICEAQKLATQAFNAVSRYMFKQGGRPRFKSFKRGLHSLEGKTNTTGLKFKPEKMLLDWCRKTYQVMLDPEDTYALEALYADKERTKFKRIKYNRIVCRNIKGVKRFYLQVVLEGTPPVKHAYAPASERMAIDPGPKAFAVFCPRVQAKVQIAPQAKVNEKAIRRIQRSMDRSLRAKNPNAFDEKGRIKPGVSLAYSKGYQARLTKLREAHRKVAGTRKCEHGELANLLLECAGNIRIEKNSWEAFKRSHFGRSINNSAASGFIQKLKSKAERAGLTVEEVSPYRLKPSQYDPYKDEFVKKALGERWMYLGDESTVIQRDIMSAILIYFADLKNQTHNPEVVKTNLEGLKRGLTDAGYVKHLKLPRSSGSKDPLFAPEPKALTTEELRSKCFRVDSDRHSSTINGTDGKAVGWSETFPLTGELFRDSVLSSVSARGAS

SEQ ID NO: 3247 - protein, 537 aa, Unknown
  Description of Unknown: uncultivated organism sequence
  Category: MG91 effectors
  Description: MG91-439 effector
MSTKSFIINLPIITGDQDRRRLRKSFSFGCNLQNAVMGGGWDRVLKMRATPEWQTARAMPKGSERTKAFRDLRVRFRLNEYDFHADVAKHRKASGRGHLLGINECQKLASRAWISVERHLYNGGSPRFISSRRGLHSIEGKTNRTGIIWKADQQCVTVCKHVYRVRVDKRDDWLTRALQDPTDPTKPRKVKYCRIVREMRKGKERFLLQLVAEGTSPLKHAYAGKDLRMAIDPGLGSLTYATEDGTIAKVQIAPSADTDHRAVRKLQRAMERSRQATNPDNYEAVDVVRHGKKKKSFKVKSGRLQWRFSKRYEKLRSELAEMLRLCAATRKREHGEVCNWLLGHAGSIIVEDNSFKAFQKGHFGKSIGRHAPAAFYTQLTSKAESAGLQVTVVSPRKLKPSQHNLLTDTFVKHELWERRVRLGNDDDDRWIDRDAAACLNLLYADLEKQTYAPERIREAVLAGVTAWLDAGVVVIQAREGYTEREFGRFRRRGIPSLTVQGLRQQGFRGRSDSKSGATPRRKASTVSKPSHFSGEVV

SEQ ID NO: 3248 - protein, 639 aa, Unknown
  Description of Unknown: uncultivated organism sequence
  Category: MG91 effectors
  Description: MG91-440 effector
MLTKELRQEALKKGFHYPKVEKSVEFYRTKNLMIYDFVNENRISMLRVCIAEKKAGIYDTFTKTWADCLLSSFLGKAGISVSELLAFALSAEAKKRLSSGHDNFDYLALYKIDQQISYAKNWEKRHPADERKKEISQIMAGTNKRLSAGFIKFNLDLFGDCKRIMYSKSEKAVYCPECESISRISSPPKKGSLYRCPVCCFTAKVSQAENPLTEVHWSCIVQPAGKRSIIRYFCNDFSLQFGKCKIASEEKFRTILEAGGSRIELMQTGNGWEDYKEKRYGLYYPSKRDVPYDMFLYGNVKAILKIPVYEHSMLDVWVKQHKNKKNELYTVYLIENYISQYAKNEIFEKLLKFGLNHIAHEAAFHNYNRTFNFNGNKIEDFLNIKMASLKQLRRIINDPFERDIIAMRYLDKNNLYLKDEELKKFLSLNVSNDMKEKIVRFCKFKKVTFYKVNNYVTENANADWSSYFDYIGWTEELEYKKSDSVYYPKKFFKTHDRVFKELEEKKDAIQRKKDKEISKKIAGLWEQRMQIPQYHYENNDLFVMMPHGTSDLKKEGRSLNHCVADYKEFVAEEKTQIFFIRKKAAPQKSFYTLEIKNHEIEQCHGRNNVDMTEEIRSFAYGYLKQLNTLNEKAAVKAVA

SEQ ID NO: 3249 - protein, 525 aa, Unknown
  Description of Unknown: uncultivated organism sequence
  Category: MG91 effectors
  Description: MG91-441 effector
MTSQSFVIELPIAVDDAEMRTIVRKLEFARQLHNATLGTAMGQLQQMRQDAAWKEACVMPKGKERAAAFRALDRKYGLTEYDLHSVIARHREGSGRKAELGINETQKIATRVFQAINRYKLGLGGMPRFKSSKRGLHSIEGKTNKTGLKFRPEKKVLNWCGHDYRVLIDPKDDYIQRALKENERSDKYRKIKYCRLVRKRIRSADRFFLQVVLEGTAPVKHVYAPVTERAAIDPGPQSIALFSKAFAGKIQVAGSSNFNEAASRRLLRAMDRSLRRNNPDAYNEDGTIKKGAKLVKSKNYQRKVDRLREMHRVAAAERKCRHGQTINLLLSIAGDIRIEKNSWKAFQRGHFGKSLGKSAMSGFIAQLKSKAASAGLKVTEVDPYKLKLSQYDPYTDTYRKKDLSERWQEMKAGSGQYIQRDILSALLLYCADIEKEIHIPKVAVEQLEGAKQFLTDAGYVVLKSTSSRDQRDLRLAPEPKAMTPEMARQKILRGAGDSHLPTDQALGRIRAGGKVSTWSKETFPL

SEQ ID NO: 3250 - protein, 633 aa, Unknown
  Description of Unknown: uncultivated organism sequence
  Category: MG91 effectors
  Description: MG91-442 effector
MLTKELRQEALKKGFHYPKVEKSVEFYRTKNLMIYDFVCEESAVVRVCISKQHAGIYDVLNNIWKDCTLENYLEDPNQFTNYILSERAKKLLKTDSLFFDSKASFAIDAQIRKAKNWKKINQKENREKEIKKIMAGTNKPVPSGFKIFSEKLLCSAKRIMYSAKEKSLYCPECGNTFQLPDVPKKGSLHTCPACGYSTKVSSAQYLNDIHWSCIVQAAGKRSIIRYFCNELFIEYGKCSTILYEKYRTIVEEDGSMVPLMQTSEGWKDYKGKNYSYFYTVPKREVPNDMYLYGTVEALMKMPALKNSMLDVWVKQHIGADKKLCSEYLVENYIKVYAQTTIYEKLLKHGLNKIAHEAAFYYDSSFHKNEEKVDKFLNLTKGNLDRLREFIPDPSGSNVSAMRYLEKYNVYLKDDELKTFLRLEVSDNMKEQIVKFCKCKKVTLYKINKYVTENANADWSSYFDYIGWTEELDYKKSDSVYYPKKFFKTHDRVFKELEEKKDAIQRKKDKEISKKIADLWEQRMQIPQYHYENNDLFVMMPHGTSDLKKEGRSLNHCVAGYKEFVAEEKTQIFFIRKKAAPQKSFYTLEIKNHDIEQCHGKNNVNMTEEIRAFAYGFLNQLKTIKEKPAVRAAA

SEQ ID NO: 3251 - protein, 525 aa, Unknown
  Description of Unknown: uncultivated organism sequence
  Category: MG91 effectors
  Description: MG91-443 effector
MTSQSFVIELQIAVDDAEMRTIVRKLEFARQLHNATLGTAMGQLQQMRQDAAWKEACVMPKGKERAAAFRALDRKYGLTEYDLHSVIARHREGSGRKAELGINETQKIATRVFQAINRYKLGLGGMPRFKSSKRGLHSIEGKTNKTGLKFRPEKKVLNWCGHDYRVLVDPKDDYIQRALKENERSDKYRKIKYCRLVRKRIRSADRFFLQVVLEGTAPVKHVYAPVTERAAIDPGPQSIALFSKAFAGKIQVAGSNNFNEAASRRLLRAMDRSLRRNNPDAYNEDGTIKKGAKLVKSKNYQRKVDRLREMHRVAAAERKCRHGQTINLLLSIAGDIRIEKNSWKAFQRGHFGKSLGKSAMSGFIAQLKSKAASAGLKVKEVNPYKLKLSQYDPYTDTYRKKDLSERWQEMKAGSGQYIQRDVLSALLLYCADIEKEIHIPKVAVEQLEGAKQFLTDAGYVVLKSTSSRDQRDLRLAPEPKAMTPEMARQKILRGAGDSHLPTDQALGRIRAGGKVSTWSKETCPL

SEQ ID NO: 3252 - protein, 634 aa, Unknown
  Description of Unknown: uncultivated organism sequence
  Category: MG91 effectors
  Description: MG91-444 effector
MLTKDLKQEALKRGFLHSGVNDSIEAYRTRNLTIYDFVCEESAVVRVCISKQHAGIYDVLSNIWKDCMLENYLEDPNQFANYMLSECAKKLLKTDSLFFDSKASFAIDAQIRKAKNWKKINQKENREKEIKKIMAGTNKPVPSGFKIFSEKLLCSAKRIMYSAKEKSLYCPECGNTFQLPDVPKKGSVHTCPACGYRAKVSCVQYQLNDIHWSCIVQAAGKRSVIRYFCNELLLEYGKCSTIFYEKYRTIIEEDGSMVPLMQTSEGWNDYKAKNYSFFYTVPKREVPNDMYLYGTVDALMKMPVLKNSMLDVWVKQHIGADKKLCSEYLVENYIKIYAKTTIYEKLLKCGLNKIAHEAAFYYGSSFHMDEKKIDKFLNLTKGNLNRLREFIPDPSGSNVSAMRYLEKYNVYLKDDELKTFLRLEVSDNMKEQIVKFCKCKKVTLYKINKYVTENANADWSSYFDYIGWTEELDYKKSDSVYYPKKFFKTHDRVFKELEEKKDAIQRKKDKEISKKIAGLWEQRMQIPQYHYEDSQFIVIMPHGTSDLKKEGKSLNHCVVSYKEYVAEKSTQIFFIRKKTDPHKSFYTLEIKNHEIAQCHGKNNVDMTEEIRAFAYGFLNQLNTIKEKPAVRAAA

SEQ ID NO: 3253 - protein, 489 aa, Unknown
  Description of Unknown: uncultivated organism sequence
  Category: MG91 effectors
  Description: MG91-445 effector
MLYNATLGSGLGRLTQMRQDPEWRRALGMVKGKERNELFRRLNRQYRLTEFDFHADIARHREGTKRKSELGINEAQKLATQAFNAVSRYMFKQGGRPRFKSFKRGLHSIEGKTNKTGLKFKPDQMILDWCRKTYQVMLDPKDAYALDALYADKERTQFKRIKYNRIVCRNIKGVKRFYLQVVLEGTPPVKHAYAPASERMAIDPGPKAFAVFCPRVQAKVQVAPRAKVNEKAIRRIQRSMDRSLRATNPNAFDEKGRIKPGVSLAYSKGYQVHLTNLREAHRKAAGTRKCEHGELANLLLECAGNIRIEKNSWEAFKRSHFGRSINNSAASGFIQRLKSKAERAGLTVEEISPFRLKPSQYDPYKDEFVKKALGERWMYLGDESTVIQRDIMSAILIYFADLKNQTHNPEVVKASLEGLKRGLTDAGYVKHLKLPRSSGSKDPLFAPEPKALTTEELRSKCFRVASNSHSSTLNGTDGKAVGWSETFWL

SEQ ID NO: 3254 - protein, 525 aa, Unknown
  Description of Unknown: uncultivated organism sequence
  Category: MG91 effectors
  Description: MG91-446 effector
MTSQSFVIELQIAVDDAEMRTIVRKLEFARQLHNATLGTAMGQLQQMRQDAAWKEACVMPKGKERAAAFRALDRKYGLTEYDLHSVIARHREGSGRKAELGINETQKIATRVFQAINRFKLGLGGMPRFKSSKRGLHSIEGKTNKTGLKFRPEKKVLNWCGHDYRVLIDPKDDYIQRALKENERSDQYRKIKYCRLVRKRIRSSDRFFLQVVLEGTAPVKHVYAPVTERAAIDPGPQSIALFSKAFAGKIQVAGSNNFNEAASRRLLRAMDRSLRRNNPDAYNENGTIKKGAKLVKSKNYQRKVDRLREMHRVAAAERKCRHGQTINLLLSIAGDIRIEKNSWKAFQKGHFGKSLGKSAMSGFIAQLKSKAASAGLKVTEVNPYKLKLSQYDPYTDTYRKKDLSERWQEMKAGSGQYIQRDILSALLLYCADIEKEIHIPKVAVEQLEGAKQFLTDAGYVVLKSTSSRDQRDPRLAPEPKAMTPEMARQKILRGAGDSHLPTDQALGRIRAGEKVSTWSKETFPL

SEQ ID NO: 3255 - protein, 525 aa, Unknown
  Description of Unknown: uncultivated organism sequence
  Category: MG91 effectors
  Description: MG91-447 effector
MTSQSFVIELQIAVDDAEMRTIVRKLEFARQLHNATLGTAMGQLQQMRQDAAWKEACVMPKGKERAAAFRALDRKYGLTEYDLHSVIARHREGSGRKAELGINETQKIATRVFQAINRYKLGLGGMPRFKSSKRGLHSIEGKTNKTGLKFRPEKKVLNWCGHDYRVLIDPKDDYIQRALKENERSDQYRKIKYCRLVRKRIRSSDRFFLQVVLEGTAPVKHVYAPVTERAAIDPGPQSIALFSKAFAGKIQVAGSNNFNEAASRRLLRAMDRSLRRNNPDAYNENGTIKKGAKLVKSKNYQRKVDRLREMHRVAAAERKCRHGQTINLLLSIAGDIRIEKNSWKAFQKGHFGKSLGKSAMSGFIAQLKSKAASAGLKVTEVNPYKLKLSQYDPYTDTYRKKDLSERWQEMKAGSGQYIQRDILSALLLYCADIEKEIHIPKVAVEQLEGAKQFLTDAGYVVLKSTSSRDQRDPRLAPEPKAMTPEMARQKILRGAGDSHLPTDQALGRIRAGEKVSTWSKETFPL

SEQ ID NO: 3256 - protein, 525 aa, Unknown
  Description of Unknown: uncultivated organism sequence
  Category: MG91 effectors
  Description: MG91-448 effector
MTSQSFVIELPIAVDDAEMRTIVRKLEFARQLHNATLGTAMGQLQQMRQDAAWKEACVMPKGKERAAAFRALDRKYGLTEYDLHSVIARHREGSGRKAELGINETQKIATRVFQAINRYKLGLGGMPRFKSSKRGLHSIEGKTNKTGLKFRPEKKVLNWCGHDYRVLIDPKDDYIQRALKENERSDKYRKIKYCRLVRKRIRSADRFFLQVVLEGTAPVKHVYAPVTERAAIDPGPQSIALFSKAFAGKIQVAGPNNFNEAASRRLLRAMDRSLKRNNPDAYNEDGTIKKGAKLVKSKNYQRKVDRLREMHRVSAAERRCLHGQTINLLLSIAGDIRIEKNSWKAFQRGHFGKSLGKSAMSGFIAQLKSKAESAGLKVTEVNPYKLKLSQYDPYTDTYRKKALSERWQEMKAGSGQYIQRDVLSALLLYCADIEKEIHIPKAAVEQLEGAKQLLTDAGYVVLKSTSSRDQRDPRLAPEPKAMTPEMARQKILRGAGDSHLPTDQALGRIRAGEKVSTWSKETFPL

SEQ ID NO: 3257 - protein, 537 aa, Unknown
  Description of Unknown: uncultivated organism sequence
  Category: MG91 effectors
  Description: MG91-449 effector
MSTKSFIISLPIITGDQDRRRLRKSFSFGCNLQNAVMGGGWDRVLQMRATPEWQATRAMPKGRERTKAFRDLRVRFRLSEYDFHADVAMHRKASGRGHLLGINECQKLASRAWISVERHLYNGGSPRFISSRRGLHSIEGKTNRTGIIWKADQQCVTVCKHVYRVRVDKRDDWLTRALQDPTDPTKPRKVKYCRIVREMRKGKERFLLQLVAEGTSPLKHAYAGKDLRMAIDPGLGSLTYATEDGTIAKVQIAPSADTDHRAIRRIQRAMERSRRATNPDNYEAVDVVRHGKKKKSFKVKSGRLQWRFSKRYESLRAELAEIFRLSAATRKREHGEVCNWLLGHAGSIIVEDNSFKAFQKGHFGKSIGRHAPAAFYTQLTSKAESAGLQVTVVSPRKLKPSQHNLLTDTFVKHELWERRVRLGNDDDDRWIDRDAAACLNLLYADLEKQTYAPERIREAVLAGVTAWLDAGVVVIQAREGITEREFGRFRRRGIPSLTVQGLRQQGFRGRSDSKSGTTPRRKASTVSKPSHFSGEVV

SEQ ID NO: 3258 - protein, 530 aa, Unknown
  Description of Unknown: uncultivated organism sequence
  Category: MG91 effectors
  Description: MG91-450 effector
MTYQSFVIELPIAVDDAEMRTIVRKLEFARQLHNATLGTAIGQLQQMRQDTAWKQACAMPKGKERTAAFRALDRKYGLTEYDLHSVIARHREGSGRKAELGINETQKIATRVFQAINRYKLGLGGMPRFKSSKRGLHSIEGKTNKTGLKFRPEKKVLNWCGHDYRVLIDPKDDYIQRALKENERSDQYRKIKYCRLVRKRIRSADRFFLQVVLEGTAPVKHVYSPVTERAAIDPGPQSIALFSKAFAGKIQVAGSNNFNEAASRRLLRAMDRSLRRNNPDAYNEDGTINKGAKLAKSKNYQRKVDQLHEMHRVAAAQRKCRHGQTINLLLSIAGDIRIEKNSWKAFQRGHFGKSLGKSAMSGFIAQLKSKAESAGLKVTEVNPYKLKLSQYDPYTDTYRKKDLSERWQEMKAGSGQYIQRDVLSALLLYCADIEKEIHIPKVAVEQLEGAKQLLTDAGYVVLKSTSSRDQRDPRLAPEPKAMTPEMARQKILRGAGDSHLPTDQALGRIRAGGKVSTWSKETFPLQRGVV

SEQ ID NO: 3259 - protein, 537 aa, Unknown
  Description of Unknown: uncultivated organism sequence
  Category: MG91 effectors
  Description: MG91-451 effector
MSTKSFIISLPIITGDQDRRRLRKSFSFGCNLQNAVMGGGWDRVLQMRATPEWQATRAMPKGRERTKAFRDLRVRFRLSEYDFHADVAKHRKASGRGHLLGINECQKLASRAWISVERHLYNGGSPRFISSRRGLHSIEGKTNRTGIIWKADQQCVTVCKHVYRVRVDKRDDWLTRALQDPTDPTKPRKVKYCRIVREMRKGKERFLLQLVAEGTSPLKHAYAGKDLRMAIDPGLGSLTYATEDGTIAKVQIAPSADTDHRAIRRIQRAMERSRRATNPDNYEAVDVVRHGKKKKSFKVKSGRLQWRFSKRYESLRAELAEIFRLSAATRKREHGEVCNWLLGHAGHIIVEDNSYKAFQRGRFGKTIGRHAPAAFYTQLTSKAESAGLQVTVVSPRKLKPSQHNLLTDTFVKHELWERRVRLGNDDDDRWIDRDAAACLNLLYADLEKQTYAPERIREAVLAGVTAWLDAGVVVIQAREGITEREFGRFRRRGIPSSTVQGLRQQGFRGRSDSKSGATPRRKASTVSKPSHFSGEVV

SEQ ID NO: 3260 - protein, 514 aa, Unknown
  Description of Unknown: uncultivated organism sequence
  Category: MG91 effectors
  Description: MG91-452 effector
MRAKNSKDDVNSAVMTTPTFVLELPVKLGQGELAEVRKRFNYARNLYNATVGTALGQLQQMRQDPQWRQACSMSKGKERTTTFRRLDEKYRLREYDLHAIIAKHREASGRKHDLGINEAQKLATRVYEVVTKYKLGLGGKPRFKTQSRGLHSISGKTNKTGLRFKPEKSRLYWNSLEMFVEIDRKDRYIFEALHVDNDPSRFKRIKYCSLVRKVINGKERYYLQLSLEGQAPIKHIYAPQTERLAIDPAPKAITVFHKEKVFKASIEVSVHAEKQKKLQKQMSRSLQLNNPDAFDENGTLKKGARLQVKSKSYLKKQTKLCEVYRRAAAARKNLHGQVSNLLLSLAGEIVLEKNSWKALQRGHFGKSLGKSGMGAFERTLISKAERAGCKVHLVAPYILKPSQYDPFKDAFEKIPLKQRWRRMDDKELIQRDMLSAVLLYCADLANERHNRTEIFQTLEGAKQLLSDGGFVVKENPTSNPALDPRFAPERKAQAIEEVRREILCGCKGQLNANR

SEQ ID NO: 3261 - protein, 497 aa, Unknown
  Description of Unknown: uncultivated organism sequence
  Category: MG91 effectors
  Description: MG91-453 effector
MTSPTFIIELPIRVSDSESRTILRKLEFARQLHNATLGTALGQLQQLRQDSEWEKACLMPKGKERSELFRKLDRKYQLTEYDLHTVIAKHRQRSGRKTELGINETQKIATRVFQAVNRYKLGLGGRPRFKSLSRGLRSIEGKSNKTGLKFNIEKSVLSWCKHDYRVFIDPQDDYLQRALRSEDRGGFKKIKYCRLVRKTIKGKNRFYLQVVLEGQAPIKHVYASSSERLSIDPGPQTIAVFSEVWAGKIKVSPTAQVDEKRLRCIQRSMDRSLRKSNPDCYESDGTLKKGCVLKKTKGYEKRIQRLQECHRKAAATRRCEHGQLINLLLSMAGDIRVEKNQWKAFQRGHFGKSLGKSGISGFIERLKSKAESAGLKVTEVRPYKLKLSQYDPYTDQYRKKSLNERWHSLGEGSEWIQRDVMSALLLQCADLEEEKHIPTEVIKTLEGVKQFLRDAGYVILKPSSNGESNPAFASEPKAVTPEKVRLEIFCGASDSYL

SEQ ID NO: 3262 - protein, 530 aa, Unknown
  Description of Unknown: uncultivated organism sequence
  Category: MG91 effectors
  Description: MG91-454 effector
MTSQSFVIELPIAVDDAEMRTIVRKLEFARQLHNATLGTAIGQLQQMRQDTAWKQACAMPKGKERTAAFRALDRKYGLTEYDLHSVIARHREGSGRKAELGINETQKIATRVFQAINRYKLGLGGMPRFKSSKRGLHSIEGKTNKTGLKFRPGKKVLNWCGHDYRVLIDPKDDYIQRALKENERSDQYRKIKYCRLVRKRIRSADRFFLQVVLEGTAPVKHVYAPVTERAAIDPGPQSIALFSKAFAGKIQVAGSNNFNEAASRRLLRAMDRSLRRHNPDAYNEDGTINKGAKLAKSKNYQRKVDQLHEMHRVAAAQRKCRHGQTINLLLSIAGDIRIEKNSWKAFQRGHFGKSLGKSAMSGFIAQLKSKAESAGLKVTEVNPYKLKLSQYDPYTDTYRKKDLSERWQEMKAGSGQYIQRDVLSALLLYCADIEKEIHIPKVAVEQLEGAKQLLTDAGYVVLKSTSSRDQRDPRLAPEPKAMTPEMARQKILRGAGDSHLPTDQALGRIRAGGKVSTWSKETFPLQRGVV

SEQ ID NO: 3263 - protein, 497 aa, Unknown
  Description of Unknown: uncultivated organism sequence
  Category: MG91 effectors
  Description: MG91-455 effector
MTSPTFIIELPIRVSDSESRTILRKLEFARQLHNATLGTALGQLQQLRQDSEWEKACLMPKGKERSELFRKLDRKYQLTEYDLHAVIAKHRRASGRKAELGINETQKIATRVFQAVNRYKLGLGGRPRFKSLSRGLRSIEGKSNKTGLKFNIEKFVLSWCKHDYRVFIDPQDDYLQRALRSEGRSGFKKVKYCRLVRKIIKGKNRFYLQVVLEGKAPIKHIYASTNERLSIDPGPQTIAVFSNVWTGKIKVSPNAQIDEKKIRRIQRSMDRSLRKSNPDCYESDGTLKKGCVLKKTKGYEKRIQRLQECHRKAAATRRCEHGQLINLLLSMAGDIRVEKNQWKAFQRGHFGKSLGKSGISGFIERLKSKAESAGLKVTEVRPYKLKLSQYDPYTDQYRKKSLNERWHSLGEGSEWIQRDVMSALLLQCADLEEEKHIPTEVIKTLEGVKQFLRDAGYVILKPSSNGESNPAFASEPKAVTPEKVRLEIFCGTSDSYL

SEQ ID NO: 3264 - protein, 498 aa, Unknown
  Description of Unknown: uncultivated organism sequence
  Category: MG91 effectors
  Description: MG91-456 effector
MSGPTFIIELPIRVSDSESQTILRKLEFARQLHNATLGSALGQLQQLRQDSDWKKACSMPKGKERTSLFKLLDRKYHLTEYDLHAVIAKHRQASGRKTELGINEAQKIATRVFQAVNRYKLGLGGRPRFKSAKRGLRSIEGKTNKTGLKFNIEKSVLSWCKHDYRVIINPKDDYIRRAFLKEDGSKGFKTIKYCRLVRKTIKGKNRFYLQVVLEGYAPVKHIYASTEERLSIDPGPQTIAVFSKMWSGKIKVAPHAQVDEQRIRNLQRSMDRSLRQNNPDCYERNGVFKKGSELSRTKSYEKRVQNLKEYHRKASATRRCEHGQLINLLLSVAGEIRIEKNSWKAFQRGHFGKSLGKSGISGFIEQLKSKAESASLKVVEVKPYKLKLSQYDPYTETYEKKALNERWHRLGRSSEWIQRDVMSALLLQCADIENDKHIPTEVIKTLEGAKQLLRDAGYVILKPSSNGDNCQPFASEPKAVTPEKVRLEIFCGTDDSHL

SEQ ID NO: 3265 - protein, 537 aa, Unknown
  Description of Unknown: uncultivated organism sequence
  Category: MG91 effectors
  Description: MG91-457 effector
MSTKSFIISLPIITGGQDRRRLRKSFSFGCNLQNAVMGGGWDRVLQMRATAEWQATRAMPKGRERTKAFRDLRVRFRLSEYDFHADVAKHRKASGRGHLLGINECQKLASRAWISVERHLYNGGSPRFISSRRGLHSIEGKTNRTGIIWKADQQCVTVCKHVYRVRVDKRDDWLTRALQDPTDPTKPRKVKYCRIVREMRKGKERFFLQLVAEGSSPLKHAYAGKDLRMAIDPGLGSLTYATEDGTIAKVQIAPSADTDHRAVRKLQRAMERSRQATNPDNYEAVDVVRHGKKKKSFKVKSGRLQWRFSKRYKSLRAELAEIFRLSAATRKREHGEVCNWLLGHAGHIIVEDNSYKAFQRGRFGKTIGRHAPAALYAQLTNKAESAGLLVEVVSPKKLKPTQHNLLTGQFVKHELWERRVRLGEDDDERWIDRDAAACLNLLYADIENQTYAPERIREAVLAGVTAWLDAGVVVIQAREGITEREFGRFRRRGIPSLTVQGLRQQGFRGRSDSKSGATPRRKASTVSKPSHFSGEVV

SEQ ID NO: 3266 - protein, 530 aa, Unknown
  Description of Unknown: uncultivated organism sequence
  Category: MG91 effectors
  Description: MG91-458 effector
MTSLSFVIELPIAVDDAEMRTIVRKLEFARQLHNATLGTAMGQLQQMRQDAAWKEACVMPKGKERAAAFRALDRKYGLTEYDLHSVIARHREGSGRKAELGINETQKIATRVFQAINRYKLGLGGMPRFKSSKRGLHSIEGKTNKTGLKFRPEKKVLNWCGHDYRVLINPKDDYIQRALKENERSDKYRKIKYCRLVRKRIRSADRFFLQVVLEGTAPVKHVYAPVTERAAIDPGPQSIALFSKAFAGKIQVAGSNNFNEAASRRLLRAMDRSLRRNNPDAYNEDGTIKKGAKLVKSKNYQRKVDRLREMHRVAAAERKCRHGQTINLLLSIAGDIRIEKNSWKAFQRGHFGKSLGKSAMSGFIAQLKSKAASAGLKVTEVNPYKLKLSQYDPYTDTYRKKDLSERWQEMKAGSGQYIQRDVLPALLLYCADIEKEIHIPKVAVEQLEGAKQLLTDAGYVVLKSTSSRDQRDPRLAPEPKAMTPEMARQKILRGAGDSHLPTDQALGRIRAGGKVSTWSKETFPLQRGVV

SEQ ID NO: 3267 - protein, 352 aa, Unknown
  Description of Unknown: uncultivated organism sequence
  Category: MG91 effectors
  Description: MG91-459 effector
MSKKTVSARVNTNIPAEVPQDVRPRFLSVQNYRLLLAVTRFSTDYAQGVVRINNMQEMNCQELKTPEVLESTACQGECKKKFTRNNAKSLFCVVDKSVDLDDVARRWSKFRFMCKDCSDQYIFTEPYHVVQLYPSVGLDNIKVLCDEGFITKYVFPIKLECTEVVTQTEVPNYHDFYKVVKSIVKDKKPHEQITKLQLLTYGRVLFTETDYDCVMKSTVDPYGEMATELEFYPQHSSMMAFLPTYKDTKPLTYIYRVVKQVYSSNYDNYVVYFPIKCTLYCKLCKDNKIYLKVHPVLYCSQCGFTDALFFRKSTVMANTMFFKECVKSKTQKPRRIIYYDMVLYKTMVKKLK

SEQ ID NO: 3268 - protein, 376 aa, Unknown
  Description of Unknown: uncultivated organism sequence
  Category: MG91 effectors
  Description: MG91-460 effector
MMKKVTTTTTTSAAIKKKVSAKVNTNREDDSLKDLRGRFLSNQNYQLMKYVLRFATAYAQGTLRVNDLKEMNCDDLKYGEVTTSACCQGECGKKFNGAKILFCVIDSEDGAGDIEDKFKLVCHFCSNDYSYQKRYEVMQLYPTVSLPVVERLCEVGFITKYIFPIELDYTVTTTRTEVCNFHNFYKMVKSIIREKKSNEHITEIRLSTYGRDLFVETDDNCIMKNGINEYSEHFYELDFPSSPSTMLPFVQTYKETKLLTYFYTVTKRVYYSFFDYVVHFPIKCTRFCKLCKEDKLYLKTHPVLYCSKCGFTDAAFFKNAPFLKTTVFLAKCVKAKTLSPTRIYYYDMNEYKSYINKPPPSAAGAKNAGKKTNKKK

SEQ ID NO: 3269 - protein, 388 aa, Unknown
  Description of Unknown: uncultivated organism sequence
  Category: MG91 effectors
  Description: MG91-461 effector
MKKTTTTTVISSSKKKVSAKVNTNRRDDDDSKFKDLRGRFLSNQNFQLMKYVLRFATNYVQGTYFVNDLKEMECTDLKYGEVERRTVCQGGCGKKFTGGNKLLFCVIDNNGTDVDDEQYEKFKVVCHVCSNDYAYKRRYEVMQLFPTVSLSVVERLCEVGFITKYIFPIDLEYTVTETRTEVCNYHNFYKMVKSIIREKKTNEHITEIKLSTYGRDLFIETDENCAMRNGQNEYNEHVYELEFHPSPSTMIPFVQTYAEKKPLTYFYTVTKRVYLSFFDYAVCFPIKCINYCKMCKQDKLYFKINPVLYCSKCGFTDASFFKNAPFLKNTVFLAKCVKAKTLPPTRIYYYDMNLYKSYMNKASLSSSPTASKNKLFDFKPKALKFGKI

SEQ ID NO: 3270 - protein, 388 aa, Unknown
  Description of Unknown: uncultivated organism sequence
  Category: MG91 effectors
  Description: MG91-462 effector
MKKTTTTTVISSSKKKVSAKVNTNRRDDDDSKFKDLRGRFLSNQNFQLMKYVLRFATNYVQGTYFVNDLKEMECTDLKYGEVERRTVCQGGCGKKFTGGNKLLFCVIDNNGDDVDDGQYEKFKVVCHVCSNDYAYKRRYEVMQLFPTVSLSVVERLCEVGFITKYIFPIDLEYTVTETRTEVCNYHNFYKMVKSIIREKKTNEHITEIKLSTYGRDLFIETDENCAMRNGQNEYNEHVYELEFHPSPSTMIPFVQTYAEKKPLTYFYTVTKRVYLSFFDYAVCFPIKCINYCKMCKQDKLYFKINPVLYCSKCGFTDASFFKNAPFLKNTVFLAKCVKAKTLPPTRIYYYDMNLYKSYMNKASLSSSPTASKNKLFDFKPKALKFGKI

SEQ ID NO: 3271 - protein, 389 aa, Unknown
  Description of Unknown: uncultivated organism sequence
  Category: MG91 effectors
  Description: MG91-463 effector
MKKTTTTTVISSSKKKVSAKVNTNRDDDDSKFKDLRGRFLSNQNFQLMKYVLRFATNYVQGTYLVNDLKEMECTDLKYGEVERRTVCQGGCGKKFTGGNKLLFCVIDNNGDDDDVDDGGNEKFKVVCHVCSNDYAYKRRYEVMQLFPTVSLSVVERLCEVGFITKYIFPIDLEYTVTETRTEVCNYHNFYKMVKSIIREKKTNEHITEIKLSTYGRDLFIETDDNCAMRNGQNEYNEHVYELEFHPSPSTMIPFVQTYAEKKPLTYFYTVTKRVYLSFFDYAVCFPIKCINYCKMCKQDKLYFKINPVLYCSKCGFTDASFFKNAPFLKNTVFLAKCVKAKTLPPTRIYYYDMNLYKSYMNKASLSSSPTASKNKLFDFKPKALKFGKI

SEQ ID NO: 3272 - protein, 353 aa, Unknown
  Description of Unknown: uncultivated organism sequence
  Category: MG91 effectors
  Description: MG91-464 effector
MKKSVSIKVPAKVNTNIGDEKPKDLRNRFLSTQNYRLLSAVSRFATDYVQGVLRVNDLVEMKCNELKGQDLVDSAVCQGECRKKFSKGAKYLFCVVDSAADVNDVTQRWNKFKLVCNTCSNDYAFNAQYEVMQLYPTVSLADVERMCEVGFLTKYIFPIKLEYTESRTETEVPGYHNFYKIVKSIVKDKKHNEQISKIQLCTYGRDLFTETDYDCAMKSGVDAYGDMTFELEFYPRDSNMMAFLETYKDTKPLTYFYRVTKRIYSSRFDYVVYFPIKCTRYCKFCKASKIYAKNNPVLYCSQCGFTDAMFFKNSPLLSSVTFYDECVKSKTLKPKRIFYYDMALYKTMSKKLK

SEQ ID NO: 3273 - protein, 497 aa, Unknown
  Description of Unknown: uncultivated organism sequence
  Category: MG91 effectors
  Description: MG91-465 effector
MTSPTFIIELPIRVSDSESRTILRKLEFARQLHNATLGTALGQLQQLRQDSEWEKACLMPKGKERSELFRKLDRKYQLTEYDLHTVIAKHRQRSGRKTELGINETQKIATRVFQAVNRYKLGLGGRPRFKSLSRGLRSIEGKSNKTGLKFNIEKSVLSWCKHDYRVFIDPQDDFLQRALRSEGRSGFKKVKYCRLVRKTIKGKNRFYLQVVLEGQAPIKHIYASTSERLSIDPGPQTIAVFSDVWAGKIKVSPTAQVDEKRLRCIQRSMDRSLRKSNPDCYESDGTLRKGCVLKKTKGYEKRIQRLQECHRKAAATRRCEHGQLINLLLSMAGDIRVEKNQWKAFQRGHFGKSLGKSGISGFIERLKSKAESAGLKVTEVKPYKLKLSQYDPYTDQYRKKSLNERWHSLGESSEWIQRDVMSALLLQCADLEEEKHIPTEVIKTLEGVKQLLRDAGYVILKPSSNGESNPTFASEPKAVTPEKVRLEIFCGASDSYL

SEQ ID NO: 3274 - protein, 497 aa, Unknown
  Description of Unknown: uncultivated organism sequence
  Category: MG91 effectors
  Description: MG91-466 effector
MPSPTFIIELPIRVSDSESRTILRKLEFARQLHNATLGTALGKLQQLRQDSEWKRACLMPKGKERSELFRKLDRKYQLSEYDLHAVIANHRQSSGRKAELGINETQKIATRVFQAVNRYKLGLGGRPRFKSLSRGLRSIEGKSNKTGLKFNIEKSVLSWCKHDYRVFIDPQDDYLQRALRSEGRSGFKKVKYCRLVRKTIKGKNRFYLQVVLEGQAPIKHIYASTNERLSIDPGPQTIAVFSNVWAGKIKVSPNAQIDEKKIRRIQRSMDRSLRKSNPDCYESDGTLKKDCVLKKTKGCEKRIQRLQECHRKVAATRQCEHGELINLLLSVAGDIRVEKNQWKAFQRGHFGKSLGKSGISGFIERLKSKAESAGLKVTEVKPYKLKLSQYDPYTDQYRKKSLNERWHSLGESSEWIQRDVMSALLLQCADLEEEKHIPTEVIKTLEGAKQLLRDAGYVILKPSSNGESNPTFASEPKAVTPEKVRLEIFCGTSDSYL

SEQ ID NO: 3275 - protein, 530 aa, Unknown
  Description of Unknown: uncultivated organism sequence
  Category: MG91 effectors
  Description: MG91-467 effector
MTSQSFVIELPIAVDDAEMRTIVRKLEFARQLHNATLGTAMGQLQQMRQDAAWKEACVMPKGKERAAAFRALDRKYGLTEYDLHSVIARHREGSGRKAELGINETQKIATRVFQAINRYKLGLGGMPRFKSSKRGLHSIEGKTNKTGLKFRPEKKVLNWCGHDYRVLIDPKDDYIQRALKENERSDKYRKIKYCRLVRKRIRSADRFFLQVVLEGTAPVKHVYAPVTERAAIDPGPQSIALFSKAFAGKIQVAVSNNFNEAASRRLLRAMDRSLRRNNPDAYNEDGTIKKGAKLVKSKNYQRKVDRLREMHRVAAAERKCRHGQTINLLLSIAGDIRIEKNSWKAFQRGHFGKSLGKSAMSGFIAQLKSKAASAGLKVTEVTPYKLKLSQYDPYTDTYRKKDLSERWQEMKAGSGQYIQRDILSALLLYCADIEKEIHIPKVAVEQLEGAKQFLTDAGYVVLKSTSSRDQRDLRLAPEPKAMTPEMARQKILRGAGDSHLPTDQALGRIRAGGKVSTWSKETFPLQRGVV

SEQ ID NO: 3276 - protein, 349 aa, Unknown
  Description of Unknown: uncultivated organism sequence
  Category: MG91 effectors
  Description: MG91-468 effector
MKKSAIAKVNTNKSDESPKDLRSRFLSTQNYRLLSAVSRFATDYVQGILRVNDLAEMRCQELKGRELLESTSCQGECRKKFSKSAKYLYCIIDSAVNVNDPSQRWNKFKFVCNSCSNDFAFNAQYEVIQLFPTVSLEDVERLCAVGFLTKYIFPIKLEYTESKTETEVPNYHNFYKIVRSIVKDKKHNEQIIKIQLSTYGRDLFIETDHNCTMRSGVDAYGDVTFDLEFYPRDSNMMSFLSTYKDTKPLTYFYRVTKRIYTSRFDYVVYFPIKCTRYCKLCKDSKIYMKTNPVLYCSQCGFTDAMFFQNSIMLSSVMFIDECVKSKTLKPKRIFYYDMALYKNIIKKLK

SEQ ID NO: 3277 - protein, 530 aa, Unknown
  Description of Unknown: uncultivated organism sequence
  Category: MG91 effectors
  Description: MG91-469 effector
MTSQSFVIELPIAVDDAEMRTIVRKLEFARQLHNATLGTALGQLQQMRQDTAWKQACAMPKGKERAAAFRALDRKYGLTEYDLHSVIARHREGTSRKAELGINETQKIATRVFQAINRYKLGLGGMPRFKSSKRGLHSIEGKTNKTGLKFRPEKKVLNWCGHDYRVLIDPKDDYIQRALKENERSDKYRKIKYCRLVRKRIRSADRFFLQVVLEGTAPVKHVYAPVTERAAIDPGPQSIALFSKAFAGKIQVAGSNNFNEAASRRLLRAMDRSLRRNNPDAYNEDGTIKKGAKLVKSKNYQRKVDRLREMHRVAAAERKCRHGQTINLLLSIAGDIRIEKNSWKAFQRGHFGKSLGKSAMSGFIAQLKSKAASAGLKVTEVNPYKLKLSQYDPYTDTYRKKDLSERWQEMKAGSGQYIQRDILSALLLYCADIEKEIHIPKVAVEQLEGAKQFLTDAGYVVLKSTSSRDQRDLRLAPEPKAMTPEMARQKILRGAGDSHLPTDQALGRIRAGGKVSTWSKETFPLQRGVV

SEQ ID NO: 3278 - protein, 537 aa, Unknown
  Description of Unknown: uncultivated organism sequence
  Category: MG91 effectors
  Description: MG91-470 effector
MSTKSFIISLPIITGGQDRRRLRKSFSFGCNLQNAVMGGGWDCVLKMRATPEWQAARAMPKGSERTKAFRDLRMRFRLSEYDFHADVAKHRKASGRGHLLGINECQKLASRAWISVERHLYNGGSPRFISSRRGLHSIEGKTNRTGIIWKADQQCVTVCKHVYRVRVDKRDDWLTRALQDPTDPKKPRKVKYCRIVREMRKGKECYFLQLVAEGTSPLKHAYAGKDLRMAIDPGLGSLTYATEDGTIAKVQIAPSADTDHRAVRKLQRAMERSRQATNPDNYETVEVVRHGKKHKSLKVKSGRLQWRFSKRSENLRAELAEIFRLSAATRKREHGEVCNWLLGHAGHIIVEDNSYKAFQRGRFGKTIGRHAPAALYAQLTNKAESAGLLVEVVSPKKLKPTQHNLLTGQFVKHELWERRVRLGEDDDERWIDRDAAACLNLLYADIENQTYAPERIREAVLAGVTAWLDAGVVVIQAREGITEREFGRFRRRGIPSLTVQGLRQQGFRGRSDSKSGATPRRKASTVSKPSHFSGEVV

SEQ ID NO: 3279 - protein, 537 aa, Unknown
  Description of Unknown: uncultivated organism sequence
  Category: MG91 effectors
  Description: MG91-471 effector
MSTKSFIISLPIITGDQDRRRLRKSFSFGCNLQNAVMGGGWDRVLKMRATAEWQTARAMPKSSERTKAFRDLRVRFRLSEYDFHADVAKHRKASGRGHLLGINECQKLASRAWISVERHLYNGGSPRFISSRRGLHSIEGKTNRTGIIWKADQQCVTVCKHVYRVRVDKCDDWLTRALQDPTDPTKPRKVKYCRIVREMRKGKERFLLQLVAEGTSPLKHAYAGKDLRMAIDPGLGSLTYATEDGTIAKVQIAPSADTDHRAIRRIQRAMERSRRATNPDNYEAVDVVRHGKKKKSFKVKSGRLQWRFSKRYESLRAELAEIFRLSAATRKREHGEVCNWLLGHAGHIIVEDNSYKAFQRGRFGKTIGRHAPAALYAQLTNKAESAGLLVEVVSPKKLKPTQHNLLTGQFVKHELWERRVRLGEDDDERWIDRDAAACLNLLYADIENQTYAPERIREAVLAGVTAWLDAGVVVIQAREGITEREFGRFRRRGIPSLTVQGLRQQGFRGRSDSKSGATPRRKASTVSKPSHFSGEVV

SEQ ID NO: 3280 - protein, 530 aa, Unknown
  Description of Unknown: uncultivated organism sequence
  Category: MG91 effectors
  Description: MG91-472 effector
MPSQSFVIELPIAVDDAEMRTIVRKLEFARQLHNATLGTAMGQLQQMRQDAAWKEACVMPKGKERAAAFRALDRKYGLTEYDLHSVIARHREGSGRKAELGINETQKIATRVFQAINRYKLGLGGMPRFKSSKRGLHSIEGKTNKTGLKFRPEKKVLNWCGHDYRVLIDPKDDYIQRALKENERSDKYRKIKYCRLVRKRIRSSDRFFWQVVLEGTAPVKHVYAPVTERAAIDPGPQSIALFSKAFAGKIQVAGSNNFNEAASRRLLRAMDRSLRRNNPDAYNENGTIKKGAKLVKSKNYQRKVDRLREMHRVAAAERKCRHGQTINLLLSIAGDIRIEKNSWKAFQRGHFGKSLGKSAMSGFIAQLKSKAASAGLKVTEVNPYKLRLSQYDPYTDTYRKKDLSERWQEMKAGSGLYIQRDVLSALLLYCADIEKEIHIPKVAVEQLEGAKQFLTDAGYVVLKSTSSRDQRDPRLASEPKAMTPEMSRQKILRGAGDSHLPTDQALGRIRAGGKVSTWSKETFPLQRGVV

SEQ ID NO: 3281 - protein, 497 aa, Unknown
  Description of Unknown: uncultivated organism sequence
  Category: MG91 effectors
  Description: MG91-473 effector
MTSPTFIIELPICVSDSESRTILRKLEFARQLHNATLGTALGQLQQLRQDSEWEKACLMPKGKERSELFIKLDRKYQLTEYDLHTVIAKHRQRSGRKTELGINETQKIATRVFQAVNRYKLGLGGRPRFKSLSRGLRSIEGKSNKTGLKFNIEKSVLSWCKHDYRVFIDPQDDYLQRALRSEGRSGFKKVKYCRLVRKTIKGKNRFYLQVVLEGQAPIKHIYASTNERLSIDPGPQTIAVFSDVWAGKIKVSPTAQVDEKRLRCIQRSMDRSLRKSNPDCYESDGTLRKGCVLKKTKGYEKRIQRLQECHRKAAATRRCEHGQLINLLLSMAGDIRVEKNQWKAFQRGHFGKSLGKSGISGFIERLKSKAESAGLKVTEVKPYKLKLSQYDPYTDQYRKKSLNERWHSLGESSEWIQRDVMSALLLQCADLEEEKHIPTEVIKTLEGVKQLLRDAGYVILKPSSNGESNPTFASEPKAVTPEKVRLEIFCGASDSYL

SEQ ID NO: 3282 - protein, 583 aa, Unknown
  Description of Unknown: uncultivated organism sequence
  Category: MG91 effectors
  Description: MG91-474 effector
MLTKDLKQEALKRGFLHSGVNDSIEAYRTRNLTIYDFVCEESAVVRVCISKQHAGIYDVLSNIWKDCMLENYLEDPNQFANYMLSECAKKLLKTDSLFFDSKASFAIDAQIRKAKNWKKINQKENREKEIKKIMAGTNKPVPSGFKIFSEKLLCSAKRIMYSAKEKSLYCPECGNTFQLPDVPKKGSLHTCPACGYSTKVSSAQYLNDIHWSCIVQAAGKRSIIRYFCNELFIEYGKCSTILYEKYRTIVEEDGSMVPLMQTSEGWKDYKGKNYSYFYTVPKREVPNDMYLYGTVEALMKMPALKNSMLDVWVKQHIGADKKLCSEYLVENYIKVYAQTTIYEKLLKHGLNKIAHEAAFYYDSSFHKNEEKVDKFLNLTKGNLDRLREFIPDPSGSNVSAMRYLEKYNVYLKDDELKTFLRLEVSDNMKEQIVKFCKCKKVTLCKINKYVTENANADWSSYFDYIGWTEELDYKKSDSVYYPKKFFKTHDRVFKELEEKKDAIQRKKDKEISKKIADLWEQRMQIPQYHYENNDLFVMMPHGTSDLKKEGRSLNHCVAGYKEFVAEEKTQIFFKQLRKNRSIH

SEQ ID NO: 3283 - protein, 537 aa, Unknown
  Description of Unknown: uncultivated organism sequence
  Category: MG91 effectors
  Description: MG91-475 effector
MSTKSFIISLPIITGDQDRRRLRKSFSFGCNLQNAVMGGGWDRVLKMRATPEWQTARAMPKSSERTKAFRDLRVRFRLSEYDFHADVAMHRKASGRGHLLGINECQKLASRAWISVERHLYNGGSPRFISSRRGLHSIEGKTNRTGIIWKADQQCVTVCKHVYRVRVDKRDDWLTRALQDPTDPTKPRKVKYCRIVREMRKGKERFLLQLVAEGTSPLKHAYAGKDLRMAIDPGLGSLTYATEDGTIAKVQIAPSADTDHRAVRKLQRAMERSRQATNPDNYETVEVVRHGKKHKSLKVKSGRLQWRFSKRYEKLRSELAEMLRLCAATRKREHGEVCNWLLGHAGHIIVEDNSYKAFQRGRFGKTIGRHAPAALYAQLTNKAESAGLLVEVVSPKKLKPSQHNLLTDTFVKHELWERRVRLGNDDDDRWIDRDAAACLNLLYADLEKQTYAPERIREAVPAGVTAWLDAGVVVIQAREGITEREFGRFRRRGIPSLTVQGLRQQGFRGRSDSKSGTTPRRKASTESKPSHFSGEVV

SEQ ID NO: 3284 - protein, 530 aa, Unknown
  Description of Unknown: uncultivated organism sequence
  Category: MG91 effectors
  Description: MG91-476 effector
MTSQSFVIELPIAVDDAEMRTIVRKLEFARQLHNATLGTAMGQLQQMRQDAAWKEACVMPKGKERAAAFRALDRKYGLTEYDLHSVIAGHREGSGRKAELGINETQKIATRVFQAINRYKLGLGGMPRFKSSKRGLHSIEGKTNKTGLKFRPEKKVLNWCGHDYRVLIDPKDDYIQRALKENERSDKYRKIKYCRLVRKRIRSSDRFFLQVVLEGTAPVKHVYAPVTERAAIDPGPQSIALFSKEFAGKIQVAGSNNFNEAVSRRLLRAMDRSLRRNNPDAYNENGTIKKGAKLVKSKNYQRKVDRLREMHRVAAAERKCRHGQTINLLLSIAGDIRIEKNSWKAFQRGHFGKSLGKSAMSGFIAQLKSKAASAGLKVTEVNPYKLKLSQYDPYTDTYRKKDLSERWQEMKAGSGQYIQRDVLSALLLYCADIEKEIHIPKVAVEQLEGAKQFLTDAGYVVLKSTSSRDQRDPRLASEPKAMTPEMARQKIFRGAGDSHLPTDQELGQIRAGGKVSTWSKETFPLQRGVV

SEQ ID NO: 3285 - protein, 525 aa, Unknown
  Description of Unknown: uncultivated organism sequence
  Category: MG91 effectors
  Description: MG91-477 effector
MTSQSFVIELPIALDDAEMRTIVRKLEFARQLHNATLGTAMGQLQQMRQDAAWKEACVMPKGKERAAAFRALDRKYGLTEYDLHSVIARHREGTGRKAELGINETQKIATRVFQAINRYKLGLGGMPRFKSSKRGLHSIEGKTNKTGLKFRPEKKVLNWCGHDYRVLIDPKDDYIQRALKENERSDKYRKIKYCRLVRKRIRSADRFFLQVVLEGTAPVKHVYAPVTERAAIDPGPQSIALFSKAFAGKIQVAGSNNFNEAASRRLLRAMDRSLRRSNPDAYNEDGTIKKGAKLVKSKNYQRKVDRLREMHRVAAAERKCRHGQTINLLLSIAGDIRIEKNSWKAFQRGHFGKSLGKSAMSGFIAQLKSKAASAGLKVKEVNPYKLKLSQYDPYTDTYRKKDLSERWQEMKAGSGQYIQRDILSALLLYCADIEKEIHIPKVAVEQLEGAKQFLTDAGYVVLKSTSSRDQRDLRLAPEPKAMTPEMARQKILRGAGDSHLPTDQALGRIRAGGKVSTWSKETFPL

SEQ ID NO: 3286 - protein, 530 aa, Unknown
  Description of Unknown: uncultivated organism sequence
  Category: MG91 effectors
  Description: MG91-478 effector
MTSQSFVIELPIAVDDAEMRTIVRKLEFARQLHNATLGTAMGQLQQMRQDAAWKEACVMPKGKERAAAFRALDRKYGLTEYDLHSVIARHREGSGRKAELGINETQKIATRVFQAINRYKLGLGGMPRFKSSKLGLHSIEGKTNKTGLKFRPEKKVLNWCGHDYRVLIDPKDDYIQRALKENERSDKYRKIKYCRLVRKRIRSSDRFFLQVVLEGTAPVKHVYAPVTERAAIDPGPQSIALFSKAFAGKIQVAGSNNFNEAASRRLLRAMDRSLRRNNPDAYNEDGTINKGAKLAKSKNYQRKVDQLHEMHRVAAAQRKCRHGQTINLLLSIAGDIRIEKNSWKAFQRGHFGKSLGKSAMSGFIAQLKSKAASAGLKVTEVNPYKLKLSQYDPYTDTYRKKDLSERWQEMKAGSGQYIQRDVLSALLLYCADIEKEIHIPKVAVEQLEGAKQLLTDAGYVVLKSTSSRDQRDPRLAPEPKAMTPEMARQKILRGAGDSHLPTDQALGRIRAGGKVSTWSKETFPLQRGVV

SEQ ID NO: 3287 - protein, 511 aa, Unknown
  Description of Unknown: uncultivated organism sequence
  Category: MG91 effectors
  Description: MG91-479 effector
MKKKSTNENFIMELPLTVEKFQYNELDKRFELMRRIYNTAQNKLKRQYEYLSSFKAYKDCKTKKEKGDFLESHPFSFKGILNKKGEPLKITFREYDLKSYLSQFTKEKVDSQYTYSDFGINSHMLMHMGMAIWSSWKKVLYDPKAQEVSFKKYGELQSIGVDWKQKKQYGMFLDLGKGIIKLNINGRQKSQARYLTMKIKFGHKERQVWYEGDALKAGEDSIKALTIVRRKIRDKYNYFLQMTIRNNKPQKGRTLGTGRVAIDLGTCKVAVVTKDSVRLIPLAPSISSYSKELRVIQRQMERSRRANNPKKYHKDGTVKKDNRDKWVTSKEYIRLRDIKAELERKQAAVRKQDHIALANELLSLGNEFVIEDNDVQEWAKRKKEEKKREKDGKNLSKAGLGKQIGNHSPATFVTILKNKVESLGGSFTEVDTDNGATDYDFINNEFTRHELEERYITLSDGKRHQRDTLAAFNLYHIDTTQNRVYDRLAMQRHYAWFCEKETEAVKKYKRL

SEQ ID NO: 3288 - protein, 537 aa, Unknown
  Description of Unknown: uncultivated organism sequence
  Category: MG91 effectors
  Description: MG91-480 effector
MSTKSFIISLPIITGGQDRRRLRKSFSFGCNLQNAVMGGGWDRVLQMRATAEWQATRAMPKGRERTKAFRDLRVRFRLSEYDFHADVAKHRKASGRGHLLGINECQKLASRAWISVERHLYNGGSPRFISSRRGLHSIEGKTNRTGIIWKADQQCVTVCKHVYRVRVDKRDDWLTRALQDPTDPKKPRKVKYCRIVREMRKGKERFLLQLVAEGTSPLKHAYAGKDLRMAIDPGLGSLTYATEDGTIAKVQIAPSADTDHRAIRRIQRAMERSRRATNPDNYEAVDVVRHGKKKKSFKVKSGRLQWRFSKRYESLRAELAEIFRLSAATRKREHGEVCNWLLGHAGHIIVEDNSYKAFQRGRFGKTIGRHAPAALYAQLTNKAESAGLLVEVVSPKKLKPTQHNLLTGQFVKHELWERRVRLGEDDDERWIDRDAAACLNLLYADIENQTYAPERIREAVLAGVTAWLDAGVVVIQAREGITEREFGRFRRRGIPSLTVQGLRQQGFRGRSDSKSGATPRRKASTVSKPSHFSGEVV

SEQ ID NO: 3289 - protein, 530 aa, Unknown
  Description of Unknown: uncultivated organism sequence
  Category: MG91 effectors
  Description: MG91-481 effector
MTSPSFVIELPIAVDDAEMRTIVRKLEFARQLHNATLGTAMGQLQLMRQDAAWKEACVMPKGKERAAAFRALDRKYGLTEYDLHSVIARHREGTGRKAELGINETQKIATRVFQAINRYKLGLGGMPRFKSFKRGLHSIEGKTNKTGLKFKPEQKVLNWCGHDYRVLIDPKDDYIQRALKDNERSDQYRKIKYCRLVRRRIRSADRFFLQVVLEGTAPVKHVYAPVTERAAIDPGPQSIALFSKEFAGKIQVAGSNNFNEAVSRRLLRAMDRSLRRNNPDAYNENGTIKKGAKLVKSKNYQRKVDRLREMHRVAAAERKCRHGQTINLLLSIAGDIRIEKNSWKAFQRGHFGKSLGKSAMSGFIAQLKSKAASAGLKVTEVNPYKLRLSQYDPYTDTYRKKDLSERWQEMKAGSGLYIQRDVLSALLLYCANIEKEIHIPKVAVEQLEGAKQFLTDAGYVVLKSTSSRDQRDPRLASEPKAMTPEMARQKIFRGAGDSHLPTDQELGQIRAGGKVSTWSKETFPLQRGVV

SEQ ID NO: 3290 - protein, 1352 aa, Unknown
  Description of Unknown: uncultivated organism sequence
  Category: MG91 effectors
  Description: MG91-482 effector
MTAFKYYLGLDMGTNSVGWAATDPEYRLLKAKGKDLWGIREFNEASGAVERRTHRISRRRRQREQVRIGILKDYFHDAICEVDPSFFQRLENSKYHEEDKDVEVRYKNNIFNDSNYTDKDYFNEYPTIYHLRNELISSTEKHDVRLVFLALLNMFKHRGHFLNAGLGENNGESNIDNVYFELTELLSELTEYHLSQDIDCKQIEAILSRRDMSRTHKAEELAGVLHVDLKNKPYKELIRGLCGLKFNACVVFPDVQSEEVTKLDICLSESTFDEKSDEIANIIGEDYFEIIMAMKEMFDIGSLASIMKGHNYLSQARVASYTKHKEDLKLLKEVIKKYCGKKEYDKFFNSDADGSYASYVGSYNSKNKERRVGNKRTSEELYKEIKKLLKDAQKEDENVQKILTSIENETFLPKQLTASNGVIPNQVHAREMKKILSNAENYLPFLTEKDETGLSVSERILKLFTFQIPYYVGPTSENSGKNGGNGWVVRREDGQVLPWNIDEKIDMKATSEAFISRMVRRCTYISGEQVLPKASLEYQSYCVLNEINNIKIDGERISVELKQDIYKAVFQKGKKVTKKQLCKYLHTRGIIETEEQVTGVDVSINNALTTYGKFKPIFGEDISKDSVQKMIEDIVFWCTVYGDSKKFLKDRIEEKYGNKLSEEQIKRILGFKFKDWGNLSKKFLELNGADTSTGESISIIRALWNNNLNLMELINSSLYNYKECLAEYQNTMLKTLSEIEAEDLNEYYFSAPVRRMIWQTILVIKELVKVLGCEPERIFVEMTRRPDEHKTRTSSRRNKFEELYKKVKDETTDWMQVIANAEEDGKIRSKKMYLYLTQKGRCMYTGKHIELDDLFDNNLYDIDHIYPRHFVKDDNIDNNLVLVCKEKNAHKSDHYPIEEEIFLSQKKMWLELRKSGFITEEKYNRLMDRNPFSDEQKAGFIARQLVETSQGTKGVANILRQLLPGSKIVYAKASNVSEFRCTRDDIPKSRLVNDFHHAHDAYLNIVVGNVYYVKFTQNPLNFIKKDYDKYKEDYNLSKMFDWDVKRNGEVAWIAQRKDGAAGTITTVKRMLSRNTPLMTRYSFDGKGGLTNETLYSAKKAKGEGYIPFKSSDDKMQDVTKYGGFTSVTGAYFFLVEHTEKKKRIRTIESVPVYLAQKIEQNPDELKKYCEEILGLIDADIRLKKIKIGSLIKRNGYFCYITGKTGNRLIVRNAVNLCLKNEWIKYISKLEKVKEKDAVDKIITKEKNEVLYSELIQKFKHGIFSKRPNPVGDKLEKDSEKFNNLSIKDQCAVLCQVLRMAAILGSECDMTLLGDSPNCGKMLISKKIGDEEIYLINQSVTGLYEKKINLHTV

SEQ ID NO: 3291 - protein, 530 aa, Unknown
  Description of Unknown: uncultivated organism sequence
  Category: MG91 effectors
  Description: MG91-483 effector
MTSQSFVIELPIAVDDAEMRTIVRKLEFARQLHNATLGTAMGQLQQMRQDAAWKEACVMPKGKERAAAFRALDRKYGLTEYDLHSVIARHREGSGRKAELGINETQKIATRVFQAINRYKLGLGGMPRFKSSKRGLHSIEGKTNKTGLKFRPEKKVLNWCGHDYRVLIDPKDDYIQRALKENERSDKYRKIKYCRLVRKRIRSSDRFFLQVVLEGTAPVKHVYAPVTERAAIDPGPQSIALFSKAFAGKIQVAGSNNFNEAASRRLLRAMDRSLRRNNPDAYNEDGTINKGVKLAKSKNYQRKVDQLHEMHRVAAVQRKCRHGQTINLLLSIAGDIRIEKNSWKAFQRGHFGKSLGKSAMSGFIAQLKSKAASAGLKVTEVNPYKLKLSQYDPYTDTYRKKDLSERWQEMKAGSGLYIQRDILSALLLYCADIEKEIHIPKVAVEQLEGAKQFLTDAGYVVLKSTSSRDQRDPRLASEPKAMTPEMARQKILRGAGDSHLPTDQELGRIRAGGKVSTWSKETFPLQRGVV

SEQ ID NO: 3292 - protein, 525 aa, Unknown
  Description of Unknown: uncultivated organism sequence
  Category: MG91 effectors
  Description: MG91-484 effector
MTSQSFVIELPIAVDDAEMRTIVRKLEFARQLHNATLGTAMGQLQQMRQDAAWKEACVMPKGKERAAAFRALDRKYGLTEYDLHSVIARHREGSGRKAELGINETQKIATRVFQAINRYKLGLGGMPRFKSSKRGLHSIEGKTNKTGLKFRPEKKVLNWCGHDYRVLIDPKDDYIQRALKENERSDKYRKIKYCRLVRKRIRSADRFFLQVVLEGTAPVKHVYAPVTERAAIDPGPQSIALFSKAFAGKIQVAGSSNFNEAASRRLLRAMDRSLRRNNPDAYNEDGTIKKGAKLVKSKNYQRKVDRLREMHRVAAAERKCRHGQTINLLLSIAGDIRIEKNSWKAFQRGHFGKSLGKSAMSGFIAQLKSKAASAGLKVTEVNPYKLKLSQYDPYTDTYRKKDLSERWQEMKAGSGQYIQRDILSALLLYCADIEKEIHIPKVAVEQLEGAKQFLTDAEYVVLKSTSSRDQRDLRLAPEPKAMTPEMARQKILRGAGDSHLPTDQALGRIRAGGKVSTWSKETFPL

SEQ ID NO: 3293 - protein, 530 aa, Unknown
  Description of Unknown: uncultivated organism sequence
  Category: MG91 effectors
  Description: MG91-485 effector
MPSQSFVIELPIAVDDAEMRTIVRKLEFARQLHNATLGTAIGQLQQMRQDTAWKQACAMPKGKERTAAFRALDRKYGLTEYDLHSVIARHREGSGRKAELGINETQKIATRVFQAINRYKLGLGGMPRFKSSKRGLHSIEGKTNKTGLKFRPEKKVLNWCGHDYRVLIDPKDDYIQRALKENERSDKYRKIKYCRLVRKRIRSSDRFFLQVVLEGTAPVKHVYAPVTERAAIDPGPQSIALFSKEFAGKIQVAGSNNFNEAASRRLLRAMDRSLRRNNPDAYNENGTIKKGAKLVKSKNYQRKVDRLREMHRVAAAERKCRHGQTINLLLSIAGDIRIEKNSWKAFQRGHFGKSLGKSAMSGFIAQLKSKAASAGLKVTEVNPYKLRLSQYDPYTDTYRKKDLSERWQEMKAGSGLYIQRDVLSALLLYCADIEKEIHIPKVAVEQLEGAKQFLTDAGYVVLKSTSSRDQRDPRLASEPKAMTPEMARQKILRGAGDSHLPTDQELGQIRAGGKVSTWSKETFPLQRGVV

SEQ ID NO: 3294 - protein, 537 aa, Unknown
  Description of Unknown: uncultivated organism sequence
  Category: MG91 effectors
  Description: MG91-486 effector
MSTKSFIISLPIITGDQDRRRLQKSFSFGCNLQNAVMGGGWDRVLKMRATAEWQTARAMPKSSERTKAFRDLRVHFRLSEYDFHADVAKHRKASGRGHLLGINEGQKLASRAWISVERHLYNGGSPRFISSRRGLHSIEGKTNRTGIIWKADQQCVTVCKHVYRVRVDKRDDWLTRALQDPTDPTRPRKVKYCRIVREMRKGKERFLLQLVAEGTSPLKHAYAGKDLRMAIDPGLGSLTYATEDGTIAKVQIAPSADTDHRAVRKLQRAMERSRQATNPDNYETVEVVRHGKKHKSLKVKSGRLQWRFSKRYESLRAELAEIFRLSAATRKREHGEVCNWLLGHAGHIIVEDNSYKAFQKGHFGKSIGRHAPAAFYTQLTSKAESAGLQVTVVSPRKLKPSQHNLLTDTFVKHELWERRVRLGNDDDDRWIDRDAAACLNLLYADLEKQTYVPERIREAVLAGVTAWLDAGVVVIQAREGITEREFGRFRRRGIPSLTVQGLRQQGFRGRSDSKSGATPRRKASTVSKPSHLSGEVV

SEQ ID NO: 3295 - protein, 524 aa, Unknown
  Description of Unknown: uncultivated organism sequence
  Category: MG91 effectors
  Description: MG91-487 effector
MTSQTFILELPIKADDSQSRTIAKKFEYGRMLYNATLGSGLGRLTQMRQDPEWRRACEMSKGKERNELFRRLNRKYRLTEYDFHADIARHREGTKRKSELGINEAQKLATQAFSAVSRYMYKQGGRPRFKSFKRGLHSLEGKTNKTGLKFRPEKMLLDWCRKSYQVMLDSDDAFILDALYADKERTHFKRIKYNRIVCRNIKGVKRFYLQVVLEGTPPVKHAYAPATERMAIDPGPKSFAVFCPRVQAKVQVAPGAKVNEKAIRRIQRSMDRSLRASNPKAFDEKGRIKSGVGLTYSKGYQARVDKLREAHRRAAGTRKCEHGELANLLLECAGNIRIEKNSWEAFKRSHFGRSINNSAASGFIQRLKSKAERAGLTVEEVSPYRLKPSQYDPYKDEFMKKALGERWMYLGDETTVIQRDIMSAILIYFADLKNQTHNPEVVKAALEGLKRGLTDAGYVKQLKLPRSSGSQDPLFAPEPKALTTEELRSKCFRAGSDRHSSTLNGTDGKAVGWSETFPLQRGVV

SEQ ID NO: 3296 - protein, 525 aa, Unknown
  Description of Unknown: uncultivated organism sequence
  Category: MG91 effectors
  Description: MG91-488 effector
MTSQSFVIELPIAVDDAEMRTIVRKLEFARQLHNATLGTAMGQLQQMRQDAAWKEACVMPKGKERAAAFRALDRKYGLTEYDLHSVIARHREGSGRKAELGINEAQKIATRVFQAINRYKLGLGGMPRFKSSKRGLHSIEGKTNKTGLKFRPEKKVLNWCGHDYRVLIDPKDDYIQRALKENERSDKYRKIKYCRLVRKRIRSADRFFLQVVLEGTAPVKHVYAPVTERAAIDPGPQSIALFSKAFAGKIQVAGPNNFNEAASRRLLRAMDRSLKRNNPDAYNEDGTIKKGAKLVKSKNYQRKVDRLREMHRVSAAERRCLHGQTINLLLSIAGDIRIEKNSWKAFQRGHFGKSLGKSAMSGFIAQLKSKAESAGLKVTEVNPYKLKLSQYDPYTDTYRKKALSERWQEMKAGSGQYIQRDVLSALLLYCADIEKEIHIPKAAVEQLEGAKQLLTDAGYVVLKSTSSRDQRDPRLAPEPKAMTPEMARQKILRGAGDSHLPTDQALGRIRAGEKVSTWSKETFPL

SEQ ID NO: 3297 - protein, 529 aa, Unknown
  Description of Unknown: uncultivated organism sequence
  Category: MG91 effectors
  Description: MG91-489 effector
MSQSYILSFELTLPQRIYPYLDKLFNVFKWEVRRTVGEIWNEDFFKRFKGRGSASAILKEILKKPPNIPSRVHRNILELSGEIVRSHIERKRIYDYLMEKPCRVLFDEDRIADELNASPLFVLNVQRQVRKILRKEKDKKSYFQVVKPSFNGEVVIFSADDSVENGQFKKLRFSRRYIEFEIKVPDGNSWKWIKVRKLISDRLKKFLTEAKRTCAPLIKKVYLKSGLSIYRLVIPLEFETRFSEGSLKVFSLDLSPSEKRLGVGVIVSPEGHSRPIFFNAEKMVKKLERILKEISNLEKKIDNIADEIHITGNREHKVRLEKRLKHLFAEQKLKWRKFKELRKQILEVFTKLILEYARAYDYSFIAVERLKFSSLPDWKNRRMRRLFSQWFYARFIERLRQKALRYGLRVLLINPYRTSRVCHKCGGEGKLEKLEFKCQCGTYDRDYNASVNIGKRALEKLVSGAKSEPYRGEDIPARFPFPQGTIHLKGKALLSILPLTLLLSYLRLVETSYLKLSRLSRYLQTDKYG

SEQ ID NO: 3298 - protein, 530 aa, Unknown
  Description of Unknown: uncultivated organism sequence
  Category: MG91 effectors
  Description: MG91-490 effector
MPSQSFVIELPIAVDDAEMRTIVRKLEFARQLHNATLGTAMGQLQQMRQDAAWKEACVMPKGKERAAAFRALDRKYGLTEYDLHSVIARHREGSGRKAELGINETQKIATRVFQAINRYKLGLGGMPRFKSSKRGLHSIEGKTNKTGLKFRPEKKVLNWCGHDYRVLIDPKDDYIQRALKENERSDKYRKIKYCRLVRKRIRSSDRFFLQVVLEGTAPVKHVYAPVTERAAIDPGPQSIALFSKEFAGKIQVAGSNNFNEAASRRLLRAMDRSLRRNNLDAYNENGTIKKGAKLVKSKNYQRKVDRLREMHRVAAAERKCRHGQTINLLLSIAGDIRIEKNSWKAFQRGHFGKSLGKSAMSGFIAQLKSKAASAGLKVTEVNPYKLRLSQYDPYTDTYRKKDLSERWQEMKAGSGLYIQRDVLSALLLYCADIEKEIHIPKVAVEQLEGAKQFLTDAGYVVLKSTSSRDQRDPRLASEPKAMTPEMARQKILRGAGDSHLPTDQELGQIRAGGKVSTWSKETFPLQRGVV

SEQ ID NO: 3299 - protein, 530 aa, Unknown
  Description of Unknown: uncultivated organism sequence
  Category: MG91 effectors
  Description: MG91-491 effector
MPSQSFVIELPIAVDDAEMRTIVRKLEFARQLHNATLGTAIGQLQQMRQDTAWKQACAMPKGKERTAAFRALDRKYGLTEYDLHSVIARHREGSGRKAELGINETQKIATRVFQAINRYKLGLGGMPRFKSSKRGLHSIEGKTNKTELKFRPEKKVLNWCGHDYRVLIDPKDDYIQRALKENERSDKYRKIKYCRLVRKRIRSSDRFFLQVVLEGTAPVKHVYAPVTERAAIDPGPQSIALFSKEFAGKIQVAGSNNFNEAASRRLLRAMDRSLRRNNPDAYNENGTIKKGAKLVKSKNYQRKVDRLREMHRVAAAERKCRHGQTINLLLSIAGDIRIEKNSWKAFQRGHFGKSLGKSAMSGFIAQLKSKAASAGLKVTEVNPYKLRLSQYDPYTDTYRKKDLSERWQEMKAGSGLYIQRDVLSALLLYCADIEKEIHIPKVAVEQLEGAKQFLTDAGYVVLKSTSSRDQRDPRLASEPKAMTPEMARQKILRGAGDSHLPTDQELGQIRAGGKVSTWSKETFPLQRGVV

SEQ ID NO: 3300 - protein, 530 aa, Unknown
  Description of Unknown: uncultivated organism sequence
  Category: MG91 effectors
  Description: MG91-492 effector
MPSQSFVIELPIAVDDAEMRTIVRKLEFARQLHNATLGTAMGQLQQMRQDAAWKEACVMPKGKERAAAFRALDRKYGLTEYDLHSVIARHREGSGRKAELGINETQKIATRVFQAINRYKLGLGGMPRFKSSKRGLHSIEGKTNKTGLKFRPEKKVLNWCGHDYRVLIDPKDDYIQRALKENERSDKYRKIKYCRLVRKRIRSSDRFFLQVVLEGTAPVKHVYAPVTKRAAIDPGPQSIALFSKEFAGKIQVAGSNNFNEAASRRLLRAMDRSLRRNNPDAYNENGTIKKGAKLVKSKNYQRKVDRLREMHRVAAAERKCRHGQTINLLLSIAGDIRIEKNSWKAFQRGHFGKSLGKSAMSGFIAQLKSKAASAGLKITEVNPYKLRLSQYDPYTDTYRKKDLSERWQEMKAGSGLYIQRDVLSALLLYCADIEKEIHIPKVAVEQLEGAKQFLTDAGYVVLKSTSSRDQRDPRLASEPKAMTPEMARQKILRGAGDSHLPTDQELGQIRAGGKVSTWSKETFPLQRGVV

SEQ ID NO: 3301 - protein, 530 aa, Unknown
  Description of Unknown: uncultivated organism sequence
  Category: MG91 effectors
  Description: MG91-493 effector
MTSQSFVIELPIAVDDAEMRTIVRKLEFARQLHNATLGTAMGQLQQMRQDAAWKEACVMPKGKERAAAFRALDRKYGLTEYDLHSVIARHREGSGRKAELGINETQKIATRVFQAINRYKLGLGGMPRFKSSKRGLHSIEGKTNKTGLKFRPEKKVLNWCGHDYRVLIDPKDDYIQRALKENERSDKYRKIKYCRLVRKRIRSADRFFLQVVLEGTAPVKHVYAPVTERAAIDPGPQSIALFSKAFAGKIQVAGPNNFNEAASRRLLRAMDRSLKRNNPDAYNEDGTIKKGAKLVKSKNYQRKVDRLREMHRVSAAERRCLHGQTINLLLSIAGDIRIEKNSWKAFQRGHFGKSLGKSAMSGFIAQLKSKAESAGLKVTEVNPYKLKLSQYDPYTDTYRKKALSERWQEMKAGSGQYIQRDILSALLLYCADIEEEIHIPKVAVEQLEGAKQFLTDAGYVVLKSTSSRDQRDPRLAPEPKAMTPEMARQKILRGAGDSHLPTDQALGRIRAGGKVSTWSKETFPLQRGVV

SEQ ID NO: 3302 - protein, 532 aa, Unknown
  Description of Unknown: uncultivated organism sequence
  Category: MG91 effectors
  Description: MG91-494 effector
MSTKSFIITLPIITGSEERRWLRKSFSFGCNLQNAVMGGGWDRVQQMRATPEWQAARVMPKGKERTQALRDLRIRFRLSEYDFHADVAQHRKASGRGHLLGINECQKIASRAWISVERHIYKGGSPRFISSKRGLHSVEGKTNKTGIIWKAEKSVFKFAGHTYRVRINKHDDWLTRALQDPTDPAKPRKVKYCRIVRNVRKGKECFDLQLIAEGTSPLKHAYAGKDLRMAIDPGLGSLTYATEDGKIAKVQIAPNADTDHRAVRKIQRAMERSRQATNPENYETVDVVRHGKKRKSLKVKSGRLQWRFSKHYEKLRAELAEIHRLAAATRKREHGEVCNWLLGHAGTIIVEDNSFKAFQRGRFGKSIGRYAPAAFYTQLTSKAESAGLQVKVVSPRKLKPTQHNLLTGRFVKHELWERRVQLGDRTGVCWIDRDAAACVNLLYADLDQQTYDPKRIREAVLAGVTAWLDAGVVVIQARERITEREFRRFRRRGIPSLAVQGLRQKGFRGRSDSKSGATPEEKSLGQIETFPL

SEQ ID NO: 3303 - protein, 530 aa, Unknown
  Description of Unknown: uncultivated organism sequence
  Category: MG91 effectors
  Description: MG91-495 effector
MTSLSFVIELPIAVDDAEMRTIVRKLEFARQLHNATLGTAMGQLQQMRQDAAWKEACVMPKGKERAAAFRALDRKYGLTEYDLHSVIARHREGSGRKAELGINETQKIATRVFQAIKRYKLGLGGMPRFKSSKRGLHSIEGKTNKTGLKFRPEKKVLNWCGHDYRVLINPKDDYIQRALKENERSDKYRKIKYCRLVRKRIRSADRFFLQVVLEGTAPVKHVYAPVTERAAIDPGPQSIALFSKAFAGKIQVAGSNNFNEAASRRLLRAMDRSLRRNNPDAYNEDGTIKKGAKLVKSKNYQRKVDRLREMHRVAAAERKCRHGQTINLLLSIAGDIRIEKNSWKAFQRGHFGKSLGKSAMSGFIAQLKSKAASAGLKVTEVNPYKLKLSQYDPYTDTYRKKDLSERWQEMKAGSGQYIQRDVLPALLLYCADIEKEIHIPKVAVEQLEGAKQLLTDAGYVVLKSTSSRDQRDPRLAPEPKAMTPEMARQKILRGAGDSHLPTDQALGRIRAGGKVSTWSKETFPLQRGVV

SEQ ID NO: 3304 - protein, 526 aa, Unknown
  Description of Unknown: uncultivated organism sequence
  Category: MG91 effectors
  Description: MG91-496 effector
MEEVFVLELPLQVEKYQADILNKRYEQLRQLYNYVQGKLLRQYRYFEQMVEFQACKTIREKRVFFRSHPFNINGKLAGNKELPEITFDEYGINGFVEKMAQKSVGTNMTYADLGFTTNILDHLSASIWSAWEKKLYDYRAKRITFKKYGELDSFSSRRKVVCGKVYFSGVELHLDTMELAIKINGKVGKDAKFITLPILHNPKHTDYEMWALKGGLDSIKVVKVVRRLVRGQYKYYLQLSIEGEKPQKGRTLGKGNVGIDIGPTTIAVSGENIASIDKLASKCDNIQEEITRLARKIDRSRRANNPENFNEDGTIKRGVRLVWNDSKRYKALRKEMAELQRRQAAIRKQQHIDRANVLLKEGDTFIVENNKISGWTRKAKETKVNEKTGKIQKKKRFGKSVANNAPAMFVTILENKVKSLGGEVVKVDTQNAASQYDFTNNSFEKHELKERSVTLSNGDTHQRDMLAAFNLQHLKYDAPEKKQYDTEAMAQHYDHFCELEKAEILRYKNKEKKDDRSTIGAGDLLD

SEQ ID NO: 3305 - protein, 537 aa, Unknown
  Description of Unknown: uncultivated organism sequence
  Category: MG91 effectors
  Description: MG91-497 effector
MSTKSFIISLPIITGDQDRRRLRKSFSFGCNLQNAVMGGGWDRVLKMRATAEWQTARAMPKSSERTKAFRDLRVRFRLSEYDFHADVAMHRKASGRGHLLGINECQKLASRAWISVERHLYNGGSPRFISSRRGLHSIEGKTNRTGIIWKADQQCVTVCKHVYRVRVDKRDDWLTRALQDPTDPTKPRKVKYCRIVREMRKGKERFLLQLVAEGTSPLKHAYAGKDLRMAIDPGLGSLTYATEDGTIAKVQIAPSADTDHRAVRKLQRAMERSRQATNPDNYETVEVVRHGKKHKSLKVKSGRLQWRFSKRYEKLRSELAEMLRLSAATRKREHGEVCNWLLGHAGHIIVEDNSYKAFQRGRFGKTIGRHAPAALYAQLTNKAESAGLLVEVVSPKKLKPSQHNLLTDTFVKHELWERRVRLGNDDDDRWIDRDAAACLNLLYADLEKQTYAPERIREAVLAGVTAWLDAGVVVIQAREGITEREFGRFRRRGIPSLTVQGLRQQGFRGRSDSKSGVTPRRKASTVSKPSHFSGEVV

SEQ ID NO: 3306 - protein, 532 aa, Unknown
  Description of Unknown: uncultivated organism sequence
  Category: MG91 effectors
  Description: MG91-498 effector
MSTKSFIITLPIITGSEERRWLRKSFSFGCNLQNAVMGGGWDRVQQMRATPEWQAARVMPKGKERTQAFRDLRIRFRLSEYDFHADVAQHRKASGRGHLLGINECQKIASRAWISVERHIYKGGSPRFISSKRGLHSVEGKTNKTGIIWKAEKSVFKFAGHTYRVRINKHDDWLTRALQDPTDPAKPRKVKYCRIVRNVRKGKECFDLQLIAEGTSPLKHAYAGKDLRMAIDPSLGSLTYATEDGKIAKVQIAPNADTDHRAVRRIQRAMERSRQATNPENYETVDVVRHGKKRKSLKVKSGRLQWRFSKHYEKLRAELAETHRLAAATRKREHGEVCNWLLGHAGTIIVEDNSFKAFQRGRFGKSIGRYAPAAFYTQLTSKAESAGLQVKVVSPRKLKPTQHNLLTGRVVKHELWERRVQLGDRTSVCWIDRDAAACVNLLYADLDQQTYDPKRIREAVLAGVTAWLDAGVVVIQAREGITEREFRRFRRRGIPSLAVQGLRQKGFRGRSDSKSGATPEEKSLGQIETFPL

SEQ ID NO: 3307 - protein, 537 aa, Unknown
  Description of Unknown: uncultivated organism sequence
  Category: MG91 effectors
  Description: MG91-499 effector
MSTKSFIISLPIITGDQDRRRLCKSFSFGCNLQNAVMGDGWDRVLKMRATPKWQAARAMPNGSERTKAFRDLRVRFRLSEYDFHADVAKHRKASGRIHLLDINECQELASRAWISVERHLYNGGSPRFISSRRGLHSIEWKTNRTGIIWKADQQCVTVSKHVYRIRVDKHDDWLTRALQDPTDPTKPRRVKYCRIVREMRKGKERFLLQLVAEGTSPLKHAYAGKDLRMAIDPGLGSLTYATEDGTIAKVQIAPSADTDQRAVRKLQRAMERSRQATNPDNYETVGVVRHGKKRKSLKVKAGRLQWRFSKRYEKLRSELAEMLRLSVATRKREHGEVCNWLLGHVGHIIVEDNSYKAFQRGRFGKTIGRHAPAALYAQLASKAECAGLLVEVVSPKKVKPTQYNLLTGQFVKHELWERRVRLGEDDDDRWIDRDAAACLNLLYADLEKQIYAPERIREAVPAGVTAWLDAGVVVIQAREGITEREFGRFRRRGIPSSTVQGLCQQGFRGRSDSKSGATPRRKASTVSKPSHFSGEVV

SEQ ID NO: 3308 - protein, 524 aa, Unknown
  Description of Unknown: uncultivated organism sequence
  Category: MG91 effectors
  Description: MG91-500 effector
MTSPSFILELPIKVNDSESRMILRKFEFARQLHNATLGSALGQLQQMRQDPQWKKACNLPKGKERSELFRNLDRQYRLTEYDLHTVIAKHRERSGRKDQLGINETQKIATRVYQSIRRYQLGLGGRPRFKSISRGLHSIEGKTNVTGLKFNLQKSVLSWCKHDYRVIIDAKDDYIQRALQKEDGTGYKKIKYCRLVRKTIKNRERFFLQVLLEGTAPVKHIYAPDSERLSIDPGPQAIAVFSEQFAGKIQIAPTAKVNEAVIRRMQRSMDRSLRQNNEEAYESNGTLKKGVKLKQTKSYKMRVAQLSDYHRRVAATRRCEHGQLANLLLSLAGDIRIEKNHWKAFQRGHFGKSLGKSGASSFIERLKSKAESAGLKVSEVKPYTLKLSQYDPYTETYRKKALSERWHQLGSSSEWIQRDVLSALLLQCADIEKEKHIPTKIIETLEGAKQLLRDAGYIVDKPSSNGDHCDRPFASEPKAQTPEEVRLEIFCGVGDSRLPLLLRNGSRQKANEKAHVRSKETFSL

SEQ ID NO: 3309 - protein, 639 aa, Unknown
  Description of Unknown: uncultivated organism sequence
  Category: MG91 effectors
  Description: MG91-501 effector
MLTKELRQEALKKGFHYPKVEKSVEFYRTKNLMIYDFVNENRISMLRVCIAEKKAGIYDTFTKTWADCLLSSFLGKAGISVSELLAFALSAEAKKRLSSGHDNFDYLALYKIDQQISYAKNWEKRHPADERKKEISQIMAGTNKRLSAGFIKFNLDLFGDCKRIMYSKSEKAVYCPECESISRISSPPKKGSLYRCPVCCFTAKVSQAENPLTEVHWSCIVQPAGKRSIIRYFCNDFSLQFGKCKIASEEKFRTILEADGSRIELMQTGNGWEDYKEKRYGLYYPSKRDVPYDMFLYGNVKAILKIPVYEHSMLDVWVKQHKNKKNELYTVYLIENYISQYAKNEIFEKLLKFGLNHIAHEAAFHNYNRTFNFNGNKIEDFLNIKMASLKQLRRIINDPFERDIIAMRYLDKNNLYLKDEELKKFLSLNVSNDMKEKIVRFCKFKKVTFYKVNNYVTENANADWSSYFDYIGWTEELEYKKSDSVYYPKKFFKTHDRVFKELEEKKDAIQRKKDKEISKKIAGLWEQRMQIPQYHYENNDLFVMMPHGTSDLKKEGRSLNHCVADYKEFVAEEKTQIFFISKKAAPQKSFYTLEIKNHEIEQCHGRNNVDMTEEIRSFAYGYLKQLNTLNEKAAVKAVA

SEQ ID NO: 3310 - protein, 532 aa, Unknown
  Description of Unknown: uncultivated organism sequence
  Category: MG91 effectors
  Description: MG91-502 effector
MSTKSFIINLPIITGDQDRRRLRKSFSFGCNLQNAVMGGGWDRVLWMRATPEWQAARVMPKGSERTKAFRDLRVQFRLSEYDFHADVAKHRKASGRSHLLGINESQKLASRAWISVERHLYNSGSPRFISSRRGLHSIEGKTNRTGIIWKADQQCVTVCKRVYRVRVDKRDDWLTRALQDPTDPKKPRKVKYCRIVREMRKGKERFLLQLVAEGTSPLKHAYAGKDQRMAIDPGLGSLTYATEDGKIAKVQIAPNADTDHRAVRRIQRAMERSRQATNPDNYETVDVVRHGKKRQSLKVKSGRLEWRFSKRYEKLRAELAQPHRLAAATRKREHGEVCNWLLGHAGTIIVEDNSFKAFQRGQFGKSIGRHAPAAFYTQLTSKAESAGLQVKVVSPKKLKPTQHNLLTGRFVKHELWERRVQLGDRTDVCWIDRDAAACVNLLYADLDQQIYDPKRIREAVLAGVTAWLDAGVVVIQAREGITEREFRRFRRRGIPSLAVQGLRQKGFRGRSDSKSGAIPEAKSLGYIETFPL

SEQ ID NO: 3311 - protein, 492 aa, Unknown
  Description of Unknown: uncultivated organism sequence
  Category: MG91 effectors
  Description: MG91-503 effector
MRATPKWQAARAMPNGSERTKAFRDLRVRFRLSEYDFHADVAKHRKASGRIHLLDINECQELASRAWISVERHLYNGGSPRFISSRRGLHSIEWKTNRTGIIWKADQQQCVTVSKHVYRIRVDKHDDWLTRALQDPTDPTKPRRVKYCRIVREMRKGKERFLLQLVAEGTSPLKHAYAGKDLRMAIDPGLGSLTYATEDGTIAKVQIAPSADTDHRAVRKLQRAMERSRQATNPDNYETVEVVRHGKKHKSLKVKSGRLQWRFSKRYEKLRSELAEMLRLSVATRKREHGEVCNWLLGHVGHIIVENNSYKAFQRGRFGKTIGRHAPAALYAQLASKAECAGLLVEVVSPKKVKPTQYNLLTGQFVKHELWERRVRLGEDDDDRWIDRDAAACLNLLYADLEKQIYAPERIREAVPAGVTAWLDAGVVVIQAREGITEREFGRFRRRGIPSSTVQGLRQQGFRGRSDSKSGATPRRKASTVSKPSHFSGEVV

SEQ ID NO: 3312 - protein, 530 aa, Unknown
  Description of Unknown: uncultivated organism sequence
  Category: MG91 effectors
  Description: MG91-504 effector
MTSQSFVIELPIAVDDAEMRTIVRKLEFARQLHNATLGTAMGQLQQMRQDAAWKEACVMPKGKERAAAFRALDRKYGLTEYDLHSVIARHREGSGRKAELGINETQKIATRVFQAINRYKLGLGGMPRFKSFKRGLHSIEGKTNKTGLKFKPEQTVLNWCGHDYRVLIDPKDDYVQRALKENERSDQYRKIKYCRLVRKRIRSSDRFFLQVVLEGTAPVKHVYAPVTERAAIDPGPQSIALFSKAFAGKIQVAGSNNFNEAASRCLLRAMDRSLRRNNPDAYNENGTIKKGAKLVKSKNYQRKVDRLREMHRVAAAERKCRHGQTINLLLSIAGDIRIEKNSWKAFQKGHFGKSLGKSAMSGFIAQLKSKAASAGLKVTEVNPYKLKLSQYDPYTDTYRKKDLSERWQEMKAGSGQYIQRDVLSALLLYCADIEKEIHIPKAAVEQLEGAKQLLTDAGYVVLKSTSSRDQRDPRLAPEPKAMTPEMARQKILRGAGDSHLPTDQALGRIRAGGKVSTWSKETFPLQRGVV

SEQ ID NO: 3313 - protein, 634 aa, Unknown
  Description of Unknown: uncultivated organism sequence
  Category: MG91 effectors
  Description: MG91-505 effector
MLTKDLKQEALKRGFLHSGVNDSIEAYRTRNLAIYDFVCEGSAVVRVCISKQHAGIYDVLNNIWKDCTLENYLEDPNQFANYMLSERAKKLLKTDSLFFDSKASFAIDVQIRKAKNWKKINQKENREKEIKKIMAGTNKPVPSGFKIFSERLLCSAKRIMYSAKEKSLYCPECGNTFQLPGVPKKGSVHTCPACGYRAKVSCVQYQLNDIHWSCIVQAAGKRSVIRYFCNELLLEYGKCSTIFYEKYRTIIEEDGSMVPLMQTSDGWNDYKAKNYSFFYTVPKREEPNDMYLYGTVDALMKMPVLKNSMLDVWVKQHIGADKKLCSEYLVENYIKIYAKTTIYEKLLKCGLNKIAHEAAFYYDSSFHREEKKVDKFLNLTKENLNRLREFIPDPSGSNVSAMRYLEKYNVYLKDDELKTFLRLEVSDNMKEQIIKFCKCKKVTLYKINKYVTENANADWSSYFDYIGWTEELDYKKSDSVYYPKKFFKTHDRVFKELEEKKDAIQRKKDKEISKKIADLWEQRMQIPQYHYENNDLFVMMPHDTSDLKKEGRSLNHCVAGYKEFVAEEKTQIFFIRKKADPQKSFYTLEIKNHDIEQCHGKNNVNMTEEIRTFAYGFLNQLNTIKEKPAVRAAA

SEQ ID NO: 3314 - protein, 530 aa, Unknown
  Description of Unknown: uncultivated organism sequence
  Category: MG91 effectors
  Description: MG91-506 effector
MTSQSFVIELPIAVDDAEMRTIVRKLEFARQLHNATLGTAIGQLQQMRQDTAWKQACAMPKGKERTAAFRALDRKYGLTEYDLHSVIARHREGSGRKAELGINETQKIATRVFQAINRYKLGLGGMPRFKSSKRGLHSIEGKTNKTGLKFRQEKKVLNWCGHDYRVLIDPKDNYVQRALKENERSDQYRKIKYCRLVRKRIRSADRFFLQVVIEGTAPVKHVYAPVTERAAIDPGPQSITLFSKAFAGKIQVAGSNNFNEAASRRLLRAMDRSLRRNNPDAYNEDGTINKGAKLAKSKNYQRKVDQLHEMHRVAAAQRKCRHGQTINLLLSIAGDIRIEKNSWKAFQRGHFGKSLGKSAMSGFIAQLKSKAASAGLKVTEVNPYKLKLSQYDPYTDTYRKKDLSERWQEMKAGSGQYIQRDVLSALLLYCADIEKEIHIPKVAVEQLEGAKQLLTDAGYVVLKSTSSRDQRDPRLAPEPKAMTPEMARQKILRGAGDSHLPTDQALGRIRAGGKVSTWSKETFPLQRGVV

SEQ ID NO: 3315 - protein, 530 aa, Unknown
  Description of Unknown: uncultivated organism sequence
  Category: MG91 effectors
  Description: MG91-507 effector
MPSQSFVIELPIAVDEAEMRTIVRKLEFARQLHNATLGTAMGQLQQMRQDAAWKEACVMPKGKERAAAFRALDRKYGLTEYDLHSVIARHREGSGRKAELGINETQKIATRVFQAINRYKLGLGGMPRFKSSKRGLHSIEGKTNKTGLKFRPEKKVLNWCGHDYRVLIDPKDDYIQRALKENERSDKYRKIKYCRLVRKRIRSSDRFFLQVVLEGTAPVKHVYAPVTERAAIDPGPQSIALFSKEFAGKIQVAGSNNFNEAASRRLLRAMDRSLRRNNPDAYNENGTIKKGAKLVKSKNYQRKVDRLREMHRVAAAERKCRHGQTINLLLSIAGDIRIEKNSWKAFQRGHFGKSLGKSAMSGFIAQLKSKAASAGLKVTEVNPYKLRLSQYDPYTDTYRKKDLSERWQEMKAGSGLYIQRDVLSALLLYCADIEKEIHIPKVAVEQLEGAKQFLTDAGYVVLKSTSSRDQRDPRLASEPKAMTPEMARQKILRGAGDSHLPTDQELGQIRAGGKVSTWSKETFPLQRGVV

SEQ ID NO: 3316 - protein, 497 aa, Unknown
  Description of Unknown: uncultivated organism sequence
  Category: MG91 effectors
  Description: MG91-508 effector
MTSPTFIIELPIRVSDSESRTILRKLEFARQLHNATLGTALGQLQQLRQDSEWEKACLMPKGKERSELFRKLDRKYQLTEYDLHTVIAKHRQRSGRKTELGINETQKIATRVFQAVNRYKLGLGGRPRFKSLSRGLRSIEGKSNKTGLKFNIEKSVLSWCKHDYRVFIDPQDDFLQRALRSEGRSGFKKVKYCRLVRKTIKGKNRFYLQVVLEGQAPIKHIYASTSERLSIDPGPQTIAVFSDVWAGKIKVSPTAQVDEKRLRCIQRSMDRSLRKSNPDCYESDGTLRKGCVLKKTKGYEKRIQRFQECHRKAAATRRCEHGQLINLLLSMAGDIRVEKNQWKAFQRGHFGKSLGKSGISGFIERLKSKAESAGLKVTEVKPYKLKLSQYDPYTDQYRKKSLNERWHSLGESSEWIQRDVMSALLLQCADLEEEKHIPTEVIKTLEGVKQLLRDAGYVILKPSSNGESNPTFASEPKAVTPEKVRLEIFCGASDSYL

SEQ ID NO: 3317 - protein, 537 aa, Unknown
  Description of Unknown: uncultivated organism sequence
  Category: MG91 effectors
  Description: MG91-509 effector
MSTKSFIINLPIITGDQDRRRLRKSFSFGCNLQNAVMGGGWDRVLRMRATPEWQAARVMPKGSERTKAFRDLRVRFRLSEYDFHADVAKHRKASGRGHLLGINECQKLASRAWISVERHLYNGGSPRFISSRRGLHSIEGKTNRTGIIWKADQQCVTVCKRVYRVRVDKRDDWLTRALQDPTDPTKPRKVKYCRIVREMRKGKERFLLQLVAEGTSPLKHAYAGKDLRMAIDPGLGSLTYATEDGTIAKVQIAPSADTDHRAIRRIQRAMERSRRATNPDNYEAVDVVRHGKKKKSFKVKSGRLQWRFSKRYESLRAELAEIFRLSAATRKREHGEVCNWLLGHAGSIIVEDNSFKAFQKGHFGKSIGRHAPAAFYTQLTSKAESAGLQVTVVSPRKLKPSQHNLLTDTFVKHELWERRVRLGNDDDDRWIDRDAAACLNLLYADLEKQTYAPERIREAVLAGVTAWLDAGVVVIQAREGITEREFGRFRRRGIPSLTVQGLRQQGFRGRSDSKSGTTPRRKASTESKPSHFSGEVV

SEQ ID NO: 3318 - protein, 537 aa, Unknown
  Description of Unknown: uncultivated organism sequence
  Category: MG91 effectors
  Description: MG91-510 effector
MSTKSFIINLPIITGDQDRRRLRKSFSFGCNLQNAVMGGGWDRVLQMRATAEWQATRAMPKGRERTKAFRDLRVRFRLSEYDFHADVAMHRKASGRGHLLGINECQKLASRAWISVERHLYNGGSPRFISSRRGLHSIEGKTNRTGIIWKADQQCVTVCKRVYRVRVDKRDDWLTRALQDPTDPKKPRKVKYCRIVREMRKGKERFLLQLVAEGTSPLKHAYAGKDLRMAIDPGLGSLTYATEDGTIAKVQIAPSADTDHRAVRKLQRAMERSRQATNPDNYETVEVVRHGKKHKSLKVKSGRLQWRFSKRYESLRAELAEIFRLSAATRKREHGEVCNWLLGHAGHIIVEDNSYKAFQRGRFGKTIGRHAPAALYAQLTNKAESAGLLVEVVSPKKLKPTQHNLLTGQFVKHELWERRVRLGNDDDDRWIDRDAAACLNLLYADLEKQIYAPERIREAVLAGVTAWLDAGVVVIQAREGITEREFGRFRRRGIPSLTVQGLRQQGFRGRSDSKSGATPRRKASTVSKPSHFSGEVV

SEQ ID NO: 3319 - protein, 497 aa, Unknown
  Description of Unknown: uncultivated organism sequence
  Category: MG91 effectors
  Description: MG91-511 effector
MTSPTFIIELPIRVSDSESRTILRKLEFARQLHNATLGTALGQLQQLRQDSEWEKACLMPKGKERSELFRKLDRKYQLTEYDLHTVIAKHRQRSGRKTELGINETQKIATRVFQAVNRYKLGLGGRPRFKSLSRGLRSIEGKSNKTGLKFNIEKSVLSWCKHDYRVFIDPQDDFLQRALRSEGRSGFKKVKYCRLVRKTIKGKNRFYLQVVLEGQAPIKHIYASTNERLSIDPGPQTIAVFSDVWAGKIKVSPTAQVDEKRLRCIQRSMDRSLRKSNSDCYESDGTLRKGCVLKKTKGYEKRIQRLQECHRKAAATRRCEHGQLINLLLSMAGDIRVEKNQWKAFQRGHFGKSLGKSGISGFIERLKSKAESAGLKVTEVKPYKLKLSQYDPYTDQYRKKSLNERWHSLGESSEWIQRDVMSALLLQCADLEEEKHIPTEVIKTLEGVKQLLRDAGYVILKPSSNGESNPTFASEPKAVTPEKVRLEIFCGASDSYL

SEQ ID NO: 3320 - protein, 537 aa, Unknown
  Description of Unknown: uncultivated organism sequence
  Category: MG91 effectors
  Description: MG91-512 effector
MSTKSFIISLPIITGDQDRRRLRKSFSFGCNLQNAVMGGGWDRVLKMRATAEWQTARAMPKSSERTKAFRDLRVRFRLSEYDFHADVAKHRKASGRGHLLGINECQKLASRAWISVERHLYNGGSPRFISSRRGLHSIEGKTNRTGIIWKADQQCVTVCKHVYRVRVDKCDDWLTRALQDPTDPTKPRKVKYCRIVREMRKGKERFLLQLVAEGTSPLKHAYAGKDLRMAIDPGLGSLTYATEDGTIAKVQIAPSADTDHRAIRRIQRAMERSRRATNPDNYEAVDVVRHGKKKKSFKVKSGRLQWRFSKRYESLRAELAEIFRLSAATRKREHGEVCNWLLGHAGSIIVEDNSFKAFQKGHFGKSIGRHAPAAFYTQLTSKAESAGLQVTVVSPRKLKPSQHNLLTDTFVKHELWERRVRLGEDDDERWIDRDAAACLNLLYADIENQTYDPERIREAVLAGVTAWLDAGVVVIQAREGITEREFGRFRRRGIPSLTVQGLRQQGFRGRSDSKSGTTPRRKASTESKPSHFSGEVV

SEQ ID NO: 3321 - protein, 1356 aa, Unknown
  Description of Unknown: uncultivated organism sequence
  Category: MG91 effectors
  Description: MG91-513 effector
MLEKPYYLGLDMGTNSVGWAVTDQQYNLLKAKGKDLWGIREFAEADTSVERRTHRISRRRRQREQARIGLLNDYFHDAIIAIDPSFFQRLENSKYHLEDKDQNVRYKYNIFNDPDYTDADYYTQYPTIYHLRKELLENPKPHDVRLVYLALLNMFKHRGHFLNSGISDGNNERSLKDAYINFAISVSELTEDYFNQDVDYSTIEGILSSRDLNRTKKAEELSTVLGIDFKNKKYKEYLRAICGLKINAYTLFSDQLPDDTTKIDLCVSDASFDEKSEELVSLIGEDLFQIILNIKEIYDIGSLAGILKGYTYLSQARVAAYDKHKHDLKLLKSSIKKYCTKEEYNNFFNSDADGSYASYIGSFNSGNKERRVGSKRTSEDLYKEIKKLLKGANKSDPAINEIFTSIETESFLPKQLTASNGIIPNQVHSKEMARILTNAENYLPFLKETDENNLSISNRILQLYKFQIPYYIGPVTEKSQRDGGNGWVIRKDNGRVFPWNIEEKIDVKATSEAFISRMVRRCTYMNGKQVLPKASLEYESFRVLNEINNLRIDGERIPVTLKQDIYTDLFQKGKKVTKKQLCNYLATRGLIESSEQVTGIDIAINNSLSTYGKFKAIFGEDIKLDHIQHMIEDIVFWCTVYGDSKQFLKEQIEDKYKGKLSPEQMKRILGFKFKDWGNLSKEFFELKGADKSTGEAVSIIRALWENNLNLMELINSPEFDFKEQLADYEANSLKTLSDFEPEDLNDYYFSAPVRRMIWQTTLIIKELVHVLGKEPARIFIEMTREKDASRGRTLSRKKKFEDLYKNVKDENTDWAKVIEHADESGTIRSKKMYLYLTQKGRCMYTGNHIELSDLFNDNLYDIDHIYPRHFVKDDNIDNNLVLVTKEKNAHKSDNYPLEAEIFNKQRNMWTQLRKEGFISEEKYNRLMGRNAFTDEQKAGFIARQLVETSQGTKGVAELFHQLLPNSKIVCAKAGNVSDFRRNRELPKSRLVNDFHHAHDAYLNIVVGNVYYVKFTQNPINYIKNSYNKDMNKNNYNLSRMFDWDVKRGDEVAWIAQKQDGATGTISTVKKMLSKNTPLMTRLSYEGKGALANETLYSAEKAKGEGYIPFKSSDTKIQDVTKYGGFTSVTGAYFFLVEHDEKKKRIRTIESVPLYLADKIDKDSSELERYCDKLGLVNYDIRVRKIKIGSLLNRNGYFAYLTGKTGKQLILRNATNLCLDKKWTRYIKKIEKYKETNVLDSIITSETMVNLYNELLNKFTVGIYGRRPNPIGEKMDSAKNTFTSYTLDNQCNLIYQLSKILGFETDLSLLRTNKQSGKPTREGGMQISKKIDNTTSMYLINQSPTGLFETKIDLQTI

SEQ ID NO: 3322 - protein, 1352 aa, Unknown
  Description of Unknown: uncultivated organism sequence
  Category: MG91 effectors
  Description: MG91-514 effector
MTAFKYYLGLDMGTNSVGWAATDPEYRLLKAKGKDLWGIREFNEASGAVERRTHRISRRRRQREQVRIGILKDYFHDAICEVDPSFFRRLENSKYHEEDKDVEVRYKNNIFNDGNYTDKDYFNEYPTIYHLRNELISSTEKHDVRLVFLALLNMFKHRGHFLNAGLGENNGESNIDNAYFELTELLSELTEYHLSQDIDCKQIEAILSRRDMSRTHKAEELAGVLHVDLKNKPYKELIRGLCGLKFNACVVFPDVQSEEVTKLDICLSESSFDEKSDEIANIIGEDYFEIIMAMKEMFDIGSLASIMKGHNYLSQARVASYTKHKEDLKLLKEVIKKYCSKKEYDKFFNSDADGSYASYVGSYNSKNKERRVGNKRTSEELYKEIKKLLKDAPKEDENVQKILTSIENETFLPKQLTASNGVIPNQVHAREMKKILSNAENYLPFLTEKDETGLSVSERILKLFTFQIPYYVGPTSENSGKNGGNGWVVRREDGQVLPWNIDEKIDMKATSEAFISRMVRRCTYISGEQVLPKASLEYQSYCVLNEINNIKIDGERISVELKQDIYKAVFQKGKKVTKKQLCKYLHTRGIIETEEQVTGVDVSINNALTTYGKFKPIFGEDISKDSVQKMIEDIVFWCTVYGDSKKFLKDRIEEKYGNKLSEEQIKRILGFKFKDWGNLSKKFLELNGADTSTGESISIIRALWNNNLNLMELINSSLYNYKECLAEYQNTMLKTLSEIEAEDLNEYYFSAPVRRMIWQTILVIKELVKVLGCEPERIFVEMTRRPDEHKTRTSSRRNKFEELYKKVKDEATDWMQVIAKAEEDGKIRSKKMYLYLTQKGRCMYTGKHIELDDLFDKNLYDIDHIYPRHFVKDDNIDNNLVLVCKEKNAHKSDHYPIEEEIFLSQKKMWLELRKSGFITEEKYNRLMDRNPFSDEQKAGFIARQLVETSQGTKGVANILRQLLPGSKIVYAKASNVSEFRHTRDDIPKSRLVNDFHHAHDAYLNIVVGNVYYVKFTQNPLNFIKKDYDKYKEDYNLSKMFDWDVKRNGEVAWIAQRKDGEAGTITTVKRMLSRNTPLMTRYSFEGKGGLANETLCSAKKAKGEGYIPFKSSDDKMQDVTKYGGFTKVTGAYFFLVEHTEKKKRIRTIESVPVYLAQKIEQNPDELKKYCKEILGLVDADIRLKKIKIGSLIKRNGYFCYITGKTGNRLSVRNAVNLCLKNEWIKYISKLEKVKEKDAVDEIITKEKNEVLYSELIQKFKHGIFSKRPNPVEDKLEKGSEKFSNLSIKEQCALLCQILQLAAVLGSECDMTLLGESAHCGKMLISKKIGDEEIYLLNQSVTGLYEKKINLHTV

SEQ ID NO: 3323 - protein, 1033 aa, Unknown
  Description of Unknown: uncultivated organism sequence
  Category: MG91 effectors
  Description: MG91-515 effector
MTAFKYYLGLDMGTNSVGWAATDPEYRLLKAKGKDLWGIREFNEASGAVERRTHRISRRRRQREQVRIGILKDYFHDAICEVDPSFFRRLENSKYHEEDKDVEVRYKNNIFNDGNYTDKDYFNEYPTIYHLRNELISSTEKHDVRLVFLALLNMFKHRGHFLNAGLGENNGESNIDNAYFELTELLSELTEYHLSQDIDCKQIEAILSRRDMSRTHKAEELAGVLHVDLKNKPYKELIRGLCGLKFNACVVFPDVQSEEVTKLDICLSESSFDEKSDEIANIIGEDYFEIIMAMKEMFDIGSLASIMKGHNYLSQARVASYTKHKEDLKLLKEVIKKYCGKKEYDKFFNSDADGSYASYVGSYNSKNKERRVGNKRTSEELYKEIKKLLKDAPKEDENVQKILTSIENETFLPKQLTASNGVIPNQVHAREMKKILSNAENYLPFLTEKDETGLSVSERILKLFTFQIPYYVGPTSENSGKNGGNGWVVRREDGQVLPWNIDEKIDMKATSEAFISRMVRRCTYISGEQVLPKASLEYQSYCVLNEINNIKIDGERISVELKQDIYKAVFQKGKKVTKKQLCKYLHTRGIIETEEQVTGVDVSINNALTTYGKFKPIFGEDISKDSVQKMIEDIVFWCTVYGDSKKFLKDRIEEKYGNKLSEEQIKRILGFKFKDWGNLSKKFLELNGADTSTGESISIIRALWNNNLNLMELINSSLYNYKECLAEYQNTMLKTLSEIEAEDLNEYYFSAPVRRIIWQTILVIKELVKVLGCEPERIFVEMTRRPDEHKTRTSSRRNKFEELYKKVKDEATDWMQVIAKAEEDGKIRSKKMYLYLTQKGRCMYTGKHIELDDLFDKNLYDIDHIYPRHFVKDDNIDNNLVLVCKEKNAHKSDHYPIEEEIFLSQKKMWLELRKSGFITEEKYNRLMGRSPFSDEQKAGFIARQLVETSQGTKGVANILRQLLPGSKIVYAKASNVSEFRHTRDDIPKSRLVNDFHHAHDAYLNIVVGNVYYVKFTQNPLNFIKKDYDKYKEG

SEQ ID NO: 3324 - protein, 1358 aa, Unknown
  Description of Unknown: uncultivated organism sequence
  Category: MG91 effectors
  Description: MG91-516 effector
MEKEYYLGLDMGTNSVGWAVTDDAYNLIRFKGKDMWGIREFDEANPAVERRTHRTSRRRKQRNAVRMGLIRSYFADEIQKVDSNFYQRLDNSFFHVEDKQDNVKDKNGIFNDKNYKDADYYKQYPTIFHLRKELIEDASQKDVRLVYLAVANMFKHRGHFLLSGIGSESSKQTITDLYNQVSGLITEEYGISLKTDIAGTDFEQVLCSREYSRTRKSEKVCEILEIKNSDKLKKAFVKSMCGLSVKITDIIDDTFTEISDEDKKITFSFVDSDYDEKAGVLEEKLGTDVYDIISKLKEIHDKAQVAEIMKNYQYLSFARVADYEKHKKDLKILKRVVKKYFEPTVYDKLFRSEENGTYSAYVNSFNSEEKSRRNYKERKQEDLYNSIKKLLKSVDNVDDTDIEYIKNEMDKENFLPKQLTFKNGVIPNQIHASELKAILKNAEKYLPFLNEKDESGYTVSERILMLFSFQIPYYVGPVSSNSNGWVKRLEPGQVLPWNIDKKIDLKETSEQFIQRMVRNCTYIAGEKVLPKASLLYENFKVLNEINNLSINGERITVNLKQDLYNTLFLKGKRVTRKQIFNYFHSRGLVEEDSQISGIDIAVNNSLSTYGKFLPLFGEHLKEDKYKKMVDDIVFWCTVYGDSRKFLREQLEEKYSDVLDENQIKRITGMKFKDWGNLSKEFLELSGCCKSTGEVMPLIRAMWETNYNLMELLHGEEFTYSEELEEKQGKIEKVLSEYTIDDLNEEYFSAPVKRMVWQTLLIIKEIEKIMKCPPTRIFVEMTRKDDEKGDNGRKSSRKDQLLALYKKIQSEDKEWKKEMSSRIEDYDKNGALRSKKLYLYFIQKGLDMYTGKPIDLDNLMSANSNYDIDHIYPRHFVKDDNINNNLVLASKPANAEKSDIYPIKDSIYQKMKYTWKVLRDEGLITEEKYKRLTGRNPFTDEQKAGFIARQLVETGQGTKGVADLLTALLPDTKLVYSKAGNVSDFRKRYDIPKSRLINDFHHAHDAYLNIVVGNIYFTKFTSNPLNYIRKECSSKDNKYQYNLGNMYKWDVKRDGKTAWVAPEEGETGTLATVKKMLSRNTPILTRLTIEGHGGIADATLYSHKKAKQDTYIPLKSSDARMADVTKYGGYSSVTTAYLFLVEHEIKGKKIRTLETVPIYLKDRLENSKEKLEENCRETLGYTNPSVRMKKIKLQSLIKLNGYYMQISGRTGNRFTLRNYVQLCLNGKWVDYIHKLEKYQDKGVIDDLITDERNVELYNVLCEKHSVGIFTLRPNLVGDKIKNGYDKFVNLTTEEQIKLLIEIIKLTCVGIVSANLTLIGGAAISGKMLMSKNITYANECILINQSVTGLYENRIDLLRV

SEQ ID NO: 3325 - protein, 1352 aa, Unknown
  Description of Unknown: uncultivated organism sequence
  Category: MG91 effectors
  Description: MG91-517 effector
MTAFKYYLGLDMGTNSVGWAATDPGYRLLKAKGKDLWGIREFNEASGAVERRTHRISRRRRQREQVRIGILKDYFHDAICEVDPSFFQRLENSKYHEEDKDVEVRYKNNIFNDSNYTDKDYFNEYPTIYHLRNELISSTEKHDVRLVFLALLNMFKHRGHFLNAGLGENNGESNIDNAYFELTELLSELTEYHLSQDIDCKQIEAILSRRDMSRTHKAEELAGVLHVDLKNKPYKELIRGLCGLKFNACVVFPDVQSEEVTKLDICLSESTFDEKSDEIANIIGEDYFEIIMAMKEMFDIGSLASIMKGHNYLSQARVASYTKHKEDLKLLKEVIKKYCGKKEYDKFFNSDADGSYASYVGSYNSKNKERRVGNKRTSEELYKEIKKLLKDAQKEDENVQKILTSIENETFLPKQLTASNGVIPNQVHAREMKKILSNAENYLPFLTEKDETGLSVSERILKLFTFQIPYYVGPTSENSGKNGGNGWVVRREDGQVLPWNIDEKIDMKATSEAFISRMVRRCTYISGEQVLPKASLEYQSYCVLNEINNIKIDGERISVELKQDIYKAVFQKGKKVTKKQLCKYLHTRGIIETEEQVTGVDVSINNALTTYGKFKPIFGEDISKDSVQKMIEDIVFWCTVYGDSKKFLKDRIEEKYGNKLSEEQIKRILGFKFKDWGNLSKKFLELNGADTSTGESISIIRALWNNNLNLMELINSSLYNYKECLAEYQNTMLKTLSEIEAEDLNEYYFSAPVRRMIWQTILVIKELVKVLGCEPERIFVEMTRKPDEHKTRTSSRRNKFEELYKKVKDETTDWMQVIANAEEDGKIRSKKMYLYLTQKGRCMYTGKHIELDDLFDNNLYDIDHIYPRHFVKDDNIDNNLVLVCKEKNAHKSDHYPIEEEIFLSQKKMWLELRKSGFITEEKYNRLMDRNPFSDEQKAGFIARQLVETSQGTKGVANILRQLLPGSKIVYAKASNVSEFRCTRDDIQKSRLVNDFHHAHDAYLNIVVGNVYYVKFTQNPLNFIKKDYDKYKEDYNLSKMFDWDVKRNGEVAWIAQRKDGAAGTITTVKRMLSRNTPLMTRYSFDGKGGLTNETLYSAKKAKGEGYIPFKSSDDKMQDVTKYGGFTSVTGAYFFLVEHTEKKKRIRTIESVPVYLAQKIEQNPDELKKYCEEILGLIDADIRLKKIKIGSLIKRNGYFCYITGKTVNRLIVRNAVNLCLKNEWIKYISKLEKVKEKDAVDKIITKEKNEVLYSELIQKFKHGIFSKRPNPVGDKLEKDSEKFNNLSIKDQCAVLCQVLRMAAILGSECDMTLLGDSPNCGKMLISKKIGDEEIYLINQSVTGLYEKKINLHTV

SEQ ID NO: 3326 - protein, 613 aa, Unknown
  Description of Unknown: uncultivated organism sequence
  Category: MG91 effectors
  Description: MG91-518 effector
MMAKETFVLTLPLKVEKWQADILDKRYELLRQIYNMVQQKLLRQYIYFSQQKAYKTCKGDFQQIREFFASHPFHFKDIKGRNGEPSDIKFPYTYESRSSSSGKRTPNGISDFISKLWAHRIGEDKTLADFGINSSILEELGLHVMQAWEKRIYDPKSSRVSFKKYGDINSFGSRCKNGSFAGFTINLGKGHITFNTNGRQRKSAELITLPIDFSREKKGYAASALKDGIDSLRKLIIVRKCIRGKNKYYLQLTISGEKPQKGRTLGRGNVGIDIGPSTIAISSLQCVHFEKLADRCDNIEHDLFLVNRKLDRSRRANNPLNFNTDRTIKRISRQKGEHRVWHDSNRYKRLKLVRKELFRKQAEIRKQQHLQMANVILSQGDTFVVENNPIDAWARRAKETTKTKTGKNRCKKRYGKSVANHAPAMFVSILRNKVQSLGGAFHEVDVRYAATQFDFTNGTKTKHEVSERSITLSNGHTHQRDMLSAFNLQHIKLESIGTEDKEYDIEQMEADYPIFRELETAELRRFKVVRHNERDALYFAGASEKHLRHQPQDESVDNRHNGGVGRKHCNTRIGSENAEITGSGLVRESIERVSQVPDEYHISSHQPIVLDGL

SEQ ID NO: 3327 - protein, 530 aa, Unknown
  Description of Unknown: uncultivated organism sequence
  Category: MG91 effectors
  Description: MG91-519 effector
MTSPSFVIELPIAVDDAEMRTIVRKLEFARQLHNATLGTAMGQLQQMRQDAAWKEACVMPKGKERAAAFRALDRKYGLTEYDLHSVIARHREGTGRKAELGINETQKIATRVFQAINRYKLGLGGMPRFKSFKRGLHSIEGKTNKTGLKFKPEQKVLNWCGHDYRVLIDPKDDYIQRALKDNERSDQYRKIKYCRLVRRRIRSADRFFLQVVLEGTAPVKHVYAPVTERAAIDPGPQSIALFSKAFAGKIQVAGSNNFNEAASRRLLRAMDRSLRRNNPDAYNEDGTINKGVKLAKSKNYQRKVDRLHEMHRVAAAQRKCRHGQTINLLLSIAGDIRIEKNSWKAFQRGHFGKSLGKSAMSGFIAQLKSKAESAGLKVTEVNPYKLKLSQYDPYTDTYRKKDLSERWQEMKAGSGQYIQRDVLSALLLYCADIEKEIHIPKAAVEQLEGAKQLLTDAGYVVLKSTSSRDQRDPRLASEPKAMTPEMARQKILRGAGDSHLPTDQALGRIRAGEKVSTWSKETFPLQRGVV

SEQ ID NO: 3328 - protein, 484 aa, Unknown
  Description of Unknown: uncultivated organism sequence
  Category: MG91 effectors
  Description: MG91-520 effector
MAHKENQKAFVITFPLRTEKWQEDRIDKMMRMLTTLYNDRQRKLVRRYIYLSHSKAYHEAKGKGVVAFKNYMKENGFSQYGLDAFFKADTKGALYQCGLNSMFLQYLSQCAWSAWDKKLFGKGDFVKTDKVVNIFCSRNKNGRFCGFDYDLSTFTIRIKSTCTKEIICSIPFVVNKNSEYELYALSQKICRIGIVRKLIRSKYKYYVQFTFDGVPYNKGRNIGTGIVGIDPGPSKIAIVGDNKVEIVKLAPNIEEDERKTARLKRKLDRSRRATNPHMYNEDGTIIKGQRQTCFSKAYNETRKQLADAQRKLAAKRKIAHNELANTLLEYGDTFKVEANSYKSMQARTKATSMTKSGRIRSKKRYGKSIKNRAPSEFLVILKNKLLYYPKGKYYDVPSSYACTQFDFTNESFTEHKISERRIVTSDGIQHNRDTLAAFNIKNAIVNDTSTKKKKFTKSKEFFDIVKMKASYNKFCVMERYLLSV

SEQ ID NO: 3329 - protein, 1358 aa, Unknown
  Description of Unknown: uncultivated organism sequence
  Category: MG91 effectors
  Description: MG91-521 effector
MEKEYYLGLDMGTNSVGWAVTDDAYNLIRFKGKDMWGIREFDEANPAVERRTHRTSRRREQRNAVRMGLIRSYFADEIQKVDSNFYQRLDNSFFHVEDKQDNVKDKNGIFNDKNYKDADYYKQYPTIFHLRKELIEDDSQKDVRLVYLAVANMFKHRGHFLLSGIGSESSKQTITDLYNQVSGLITEEYGISLKTDIAGTDFEQVLCSREYSRTRKSEKVCEILEIKNSDKLKKAFVKSMCGLSVKITDIIDDTFTEISDEDKKITFSFVDSDYDEKAGVLEEKLGTDVYDIISKLKEIHDKAQVAEIMKNYQYLSFARVADYEKHKKDLKILKRVVKKHFEPTVYDKLFRSEENGTYSAYVNSFNSGEKSRRNYKERKQEDLYNSIKKLLKSVDNVYDTDIEYIKNEMDKENFLPKQLTFKNGVIPNQIHASELKAILKNAEKYLPFLNEKDESGYTVSERILMLFSFQIPYYVGPVSSNSNGWVKRLESGQVLPWNIDKKIDLKETSEQFIQRMVRNCTYIAGEKVLPKASLLYENFKVLNEINNLSINGERITVNLKQDLYNTLFLKGKRVTRKQIFNYFHSRGLVEEDSQISGIDIAVNNSLSTYGKFLPLFGEHLKEDKYKKMVDDIVFWCTVYGDSRKFLREQLEEKYSDVLDENQVKRITGMKFKDWGNLSKEFLELSGCCKSTGEVMPLIRAMWETNYNLMELLHSEEFTYSEELEEKQGKIEKVLSEYTIDDLNEEYFSAPVKRMVWQTLLIIKEIEKIMKCPPTRIFVEMTRKDDEKGDNGRKSSRKDQLLALYKKIQSEDKEWKKEMSSRIEDYDKKGALRSKKLYLYFIQKGLDMYTGKPIDLDNLMSANSNYDIDHIYPRHFVKDDNINNNLVLASKPANAEKSDIYPIKDSIYQKMKYTWKVLRDEGLITEEKYKRLTGRNPFTDEQKAGFIARQLVETGQGTKGVADLLTALLPDTKLVYSKAGNVSDFRKRYDIPKSRLINDFHHAHDAYLNIVVGNIYFTKFTSNPLNYIRKECSSKDNKYQYNLGNMYKWDVKRDGKTAWVAPEEGETGTLATVKKMLSRNTPILTRLTIEGHGGIADATLYSHKKAKQDTYIPLKSSDARMADVTKYGGYSSVTTAYLFLVEHEIKGKKIRTLETVPIYLKDRLENSKEKLEEYCRETLGYTNPSVRMKKIKLQSLIKLNGYYMQISGITGNRFTLRNYVQLCLNGKWVDYIHKLEKYQDKGVIDDLITDERNVELYNVLCEKHSVGIFTLRPNLVGDKIKNGYDKFVNLTTEEQIKLLIEIIKLTCVGIVSANLTLIGGAAISGKMLMSKNITDANECILINQSVTGLYENRIDLLRV

SEQ ID NO: 3330 - protein, 537 aa, Unknown
  Description of Unknown: uncultivated organism sequence
  Category: MG91 effectors
  Description: MG91-522 effector
MSTKSFIISLPIITGDQDRRRLRKSFSFGCNLQNAVMGGGWDRVLQMRATPEWQATRAMPKGRERTKAFRDLRVRFRLSEYDFHADVAMHRKASGRGHLLGINECQKLASRAWISVERHLYNGGAPRFISSRRGLHSIEGKTNRTGIIWKADQQCVTVCKHVYRVRVDKRDDWLTRALQDPTDPTKPRKVKYCRIVREMRKGKERFLLQLVAEGTSPLKHAYAGKDLRMAIDPGLGSLTYATEDGTIAKVQIAPSADTDHRAVRKLQRAMERSRQATNPDNYETVEVVRHGKKHKSLKVKSGRLQWRFSKRYEKLRSELAEMLRLCAATRKREHGEVCNWLLGHAGHIIVEDNSFKAFQKGHFGKSIGRHAPAAFYTQLTSKAESAGLQVTVVSPRKLKPSQHNLLTDTFVKHELWERRVRLGKDDDDRWIDRDAAACLNLLYADIENQTYDPERIREAVLAGVTAWLDAGVVVIQAREGITEREFGRFRRRGIPSLTVQGLRQQGFRGRSDSKSGATPRRKASTVSKPSHFSGEVV

SEQ ID NO: 3331 - protein, 537 aa, Unknown
  Description of Unknown: uncultivated organism sequence
  Category: MG91 effectors
  Description: MG91-523 effector
MSTKSFIISLPIITGDQDRRRLRKSFSFGCNLQNAVMGGGWDRVLKMRATAEWQTARAMPKNSERTKAFRDLRVRFRLSEYDFHADVAKHRKASGRGHLLGINECQKLASRAWISVERHLYNGGSPRFISSRRGLHSIEGKTNRTGIIWKADQQCVTVCKHVYRVRVDKRDDWLTRALQDPTDPTKPRKVKYCRIVREMRKGKERFLLQLVAEGTSPLKHAYAGKDLRMAIDPGLGSLTYATEDGTIAKVQIAPSADTDHRAIRRIQRAMERSRRATNPDNYEAVDVVRHGKKKKSFKVKSGRLQWRFSKRYESLRAELAEIFRLSAATRKREHGEVCNWLLGHAGSIIVEDNSFKAFQKGHFGKSIGRHAPAAFYTQLTSKAESAGLQVTVVSPRKLKPSQHNLLTGQFVKHELWERRVRLGNDDDDRWIDRDAAACLNLLYADLEKQTYAPERIREAVLAGVTAWLDAGVVVIQAREGITEREFGRFRRRGIPSLTVQGLRQQGFRGRSDSKSGATPRRKASTVSKPSHLSGEVV

SEQ ID NO: 3332 - protein, 530 aa, Unknown
  Description of Unknown: uncultivated organism sequence
  Category: MG91 effectors
  Description: MG91-524 effector
MTSPSFVIELPIAVDDAEMRTIVRKLEFARQLHNATLGTAIGQLQQMRQDTAWKQACAMPKGKERTAAFRALDRKYGLTEYDLHSVIARHREGTGRKAELGINETQKIATRVFQAINRYKLGLGGMPRFKSFKRGLHSIEGKTNKTGLKFKPEQKVLNWCGHDYRVLIDPKDDYIQRALKDNERSDQYRKIKYCRLVRRRIRSADRFFLQVVLEGTAPVKHIYAPVVERAAIDPGPQSIALFSKEFAGKIQVAGPNNFNEAASRRLLRAMDRSLKRNNPDAYNEDGTIKKGAKLVKSKNYQRKVDRLHEMHRVSAAERRCLHGQTINLLLSIAGDIRIEKNSWKAFQRGHFGKSLGKSAMSGFIAQLKSKAESAGLKVTEVNPYKLKLSQYDPYTDTYRKKALSERWQEMKAGSGQYIQRDVLSALLLYCADIEKEIHIPKAAVEQLEGAKQLLTDAGYVVLKSTSSRDQRDPRLAPEPKAMTPEMARQKILRGAGDSHLPTDQALGWIRAGEKVSTWSKETFPLQRGVV

SEQ ID NO: 3333 - protein, 484 aa, Unknown
  Description of Unknown: uncultivated organism sequence
  Category: MG91 effectors
  Description: MG91-525 effector
MAHKENQKAFVVTFPLRTEKWQEDRIDKMMRMLTTFYNDRQRKLVRRYIYLSHSKAYKEAKGKGVVAFKNYMKENGFSQYGLDAFFKADTKGALYQCGLNSMFLQYLSQCAWSAWDKKLFGKGDFVKTDKVVNIFCSRNKKERFCGFDYDLSTFTIRIKSTCTKKIICTIPFVVNKNSEYELYALSQKICRIGIVRKLIRSKYKYYVQFTFDGVPYNKGRNIGTGIVGIDPGPSKIAIVGDNKVEIAKLAPNLIEDERKTARLKRKLDRSRRATNPHMYKEDGTIIKGQRQTCFSKVYNETRKQLADAQRKLAAKRKIAHNELANTLLEYGDTFKVEANSYKSMQARAKATSMTKSGRIRSKKRYGKSINNRAPSEFLVILKNKLLYYPKGKYYDVPSSYACTQFDFTNESFTEHKISERRIVTSDGIQHNRDTLAAFNIKNAIVNDTSTKKKKVTKSKEFFDIVKMKASYNDFCLMERYLLSV

SEQ ID NO: 3334 - protein, 525 aa, Unknown
  Description of Unknown: uncultivated organism sequence
  Category: MG91 effectors
  Description: MG91-526 effector
MTSQSFVIELPIAVDDAEMRTIVRKLEFARQLHNATLGTAMGQLQQMRQDAAWKEACVMPKGKERAAAFRALDRKYGLTEYDLHSVIARHREGSGRKAELGINETQKIATRVFQAINRYKLGLGGMPRFKSSKRGLHSIEGKTNKTGLKFRPEKKVLNWCGHDYRVLIDPKDDYIQRALKENERSDKYRKIKYCRLVRKRIRSADRFFLQVVLEGTAPVKHIYAPVTERAAIDPGPQSIALFSKAFAGKIQVAGSSNFNESASRRLLRAMDRSLRRNNPDAYNEDGTIKKGAKLVKSKNYQRKVDRLREMHRVAAAERKCRHGQTINLLLSIAGDIRIEKNSWKAFQRGHFGKSLGKSAMSGFIAQLKSKAASAGLKVTEVNPYKLKLSQYDPYTDTYRKKDLSERWQEMKAGSGQYIQRDILSALLLYCADIEKEIHIPKVAVEQLEGAKQFLTDAGYVVLKSTSSRDQRDLRLAPEPKAMTPEMARQKILRGAGDSHLPTDQALGRIRAGGKVSTWSKETFPL

SEQ ID NO: 3335 - protein, 537 aa, Unknown
  Description of Unknown: uncultivated organism sequence
  Category: MG91 effectors
  Description: MG91-527 effector
MSTKSFIISLPIITGDQDRRRLRKSFSFGCNLQNAVMGGGWDHVLQMRVTPEWHATRAMPKGRERTKAFRDLRVRFRLSEYDFHADVAKHRKASGRCHLLGINESQKLASRAWISVERHLYNGGSPRFISSRRGLHSIEGKTNRTGIIWKADQQCVTVCKHVYRVRVDKCDDWLTRALQDPTDPTKPRKVKYCRIVREMRKGKERFLLQLVAEGTSPLKHAYAGKDLRMAIDPGLGSLTYATEDGTIAKVQIAPSADTDHRAIRRIQRAMERSRRATNPDNYEAVDVVRHGKKKKSFKVKSGRLQWRFSKRYESLRAELAEIFRLSAATRKREHGEVCNWLLGHAGHIIVEDNSYKAFQKGHFGKSIGRHAPAAFYTQLTSKAESAGLQVTVVSPRKLKPSQHNLLTDTFVKHELWERRVRLGNDDDDRWIDRDAAACLNLLYADLEKQTYAPERIREAVLAGVTAWLDAGVVVIQAREGITEREFGRFRRRGIPSSTVQGLRQRGFRGRSDSKSGTTPRRKASTVSKPSHFSGEVV

SEQ ID NO: 3336 - protein, 1108 aa, Unknown
  Description of Unknown: uncultivated organism sequence
  Category: MG91 effectors
  Description: MG91-528 effector
MTAFKYYLGLDMGTNSVGWAATDPEYRLLKAKGKDLWGIREFNEASGAVERRTHRISRRRKQREQVRIGILKDYFHDAICEVDPSFFQRLENSKYHEEDKDVEVRYKNNIFNDSNYTDKDYFNEYPTIYHLRNELISSTEKHDVRLVFLALLNMFKHRGHFLNAGLGENNGESNIDNAYFELTELLSELTEYHLSQDIDCKQIEAILSRRDMSRTHKAEELAGVLHVDLKNKPYKELIRGLCGLKFNACVVFPDVQSEEVTKLDICLSESTFDEKSDEIANIIGEDYFEIIMAMKEMFDIGSLASIMKGHNYLSQARVASYTKHKEDLKLLKEVIKKYCGKKEYDKFFNSDADGSYASYVGSYNSKNKERRVGNKRTSEELYKEIKKLLKDAQKEDENVQKILTSIENETFLPKQLTASNGVIPNQVHAREMKKILSNAENYLPFLTEKDETGLSVSERILKLFTFQIPYYVGPTSENSGKNGGNGWVVRREDGQVLPWNIDEKIDMKATSEAFISRMVRRCTYISGEQVLPKASLEYQSYCVLNEINNIKIDGERISVELKQDIYKAVFQKGKKVTKKQLCKYLHTRGIIETEEQVTGVDVSINNALTTYGKFKPIFGEDISKDSVQKMIEDIVFWCTVYGDSKKFLKDRIEEKYGNKLSEEQIKRILGFKFKDWGNLSKKFLELNGADTSTGESISIIRALWNNNLNLMELINSSLYNYKECLAEYQNTMLKTLSEIEAEDLNEYYFSAPVRRMIWQTILVIKELVKVLGCEPERIFVEMTRRPDEHKTRTSSRRNKFEELYKKVKDETTDWMQVIANAEEDGKIRSKKMYLYLTQKGRCMYTGKHIELDDLFDNNLYDIDHIYPRHFVKDDNIDNNLVLVCKEKNAHKSDHYPIEEEIFLSQKKMWLELRKSGFITEEKYNRLMGRSPFSDEKKAGFIARQLVETSQGTKGVANILRQLLPGSKIVYAKASNVSEFRHTRDDIPKSRLVNDFHHAHDAYLNIVVGNVYYVKFTQNPLNFIKKDYDKYKEDYNLSKMFDWDVKRNGEVAWIAQRKDGEAGTITTVKKMLSRNTPLMTRYSFEGIFKAYLRNLMRQLEAMEQVECHS

SEQ ID NO: 3337 - protein, 537 aa, Unknown
  Description of Unknown: uncultivated organism sequence
  Category: MG91 effectors
  Description: MG91-529 effector
MSTKSFIINLPIITGDQDRRRLRKSFSFGCNLQNAVMGGGWDRVLRMRATPEWQAARVMPKGSERTKAFRDLRVQFRLSEYDFHADVAKHRKASGRSHLLGINESQKLASRAWISVERHLYNSGSPRFISSRRGLHSIEGKTNRTGIIWKADQQCVTVCKHVYRVRVDKRDDWLTRALQDPTDPTKPRKVKYCRIVRNVRKGKECFDLQLIAEGTSPLKHAYAGKDQRMAIDPGLGSLTYATEDGKIAKVQIAPNADTDHRAVRRIQRAMERSRQATNPDNYETVDVVRHGKKRQSLKVKSGRLEWRFSKRYEKLRAELAETHRLAAATRKREHGEVCNWLLGHAGTIIVEDNSFKAFQKGRFGKSIGRYAPAAFYTQLTSKAESAGLQVKVVSPKKLKPTQHNLLTGRFVKHELWERRVQLGDRTGVCWIDRDAAACVNLLYADLDQQTYDPKRIREAVLAGVTAWLDAGVVVIQAREGITEREFGRFRGRGIPSLAVQGLRQQGFRGRSDSKSGTTPRRKASTVPKPSHFSGEVV

SEQ ID NO: 3338 - protein, 537 aa, Unknown
  Description of Unknown: uncultivated organism sequence
  Category: MG91 effectors
  Description: MG91-530 effector
MSTKSFIISLPIITGDQDRRRLRKSFSFGCNLQNAVMGGGWDRVLKMRATAEWQTARAMPKSSERTKAFRDLRVHFRLSEYDFHADVAMHRKASGRGHLLGINECQKLASRAWISVERHLYNGGSPRFISSRRGLHSIEGKTNRTGIIWKADQQCVTVCKHVYRVRVDKRDDWLTRALQDPTDPTKPRKVKYCRIVREMRKGKERFLLQLVAEGTSPLKHAYAGKDLRMAIDPGLGSLTYATEDGTIAKVQIAPSADTDHRAVRKLQRAMERSRQATNPDNYEAVDVVRHGKKKKSFKVKSGRLQWRFSKRYEKLRSELAEMLRLCAATRKREHGEVCNWLLGHAGHIIVEDNSYKAFQRGRFGKTIGRHAPAALYAQLTNKAESAGLLVEVVSPKKLKPTQHNLLTGQFVKHELWERRVRLGNDDDDRWIDRDAAACLNLLYADLEKQTYVPERIREAVLAGVTAWLDAGVVVIQAREGITEREFGRFRRRGIPSLTVQGLRQQGFRGRSDSKSGTTPRRKASTESKPSHFSGEVV

SEQ ID NO: 3339 - protein, 535 aa, Unknown
  Description of Unknown: uncultivated organism sequence
  Category: MG91 effectors
  Description: MG91-531 effector
MKTNSLVLSYELTLPQRIYPELDRLFSAFKWEVRGLVDELWNEEGFGLLRKAGSACSILKNAIKKPPVLPSRAYRNILELSGQIIRSHLKRKEIFDYIMDNPHLVFCNENIIARDFDTSPFFVSNIQNQIRNLFQKGKIVQKEDYFSIVKSCFSGNVVITSADDNLEKGQFRRLEIKGDKLIFEIKVPDSKGWKWIKVTKLIPNRLRKVLSRAKTVESPLIKRVFLKSGFTVYKLIIPVQIETKTKDKIEKVFAVDLSPSEKRLGTGVVVSEEGYSKPVFFSAYKMVKKLERLYRELSDLERKIDNIGNQIHRTKKNHRGILYQRLKHLFAERKLRWKKFKELRKQVLEVFINLIIEHAKTYSCDAIAIENLKFKALPDWNSKKFRRHFSLWFYSKFEKRLKHKALRSGLRVIKVNPYRSSRRCHICGYEGKTNRLEFICSKCQKRFDRDYNAAINIGIKALAVYRTKSEPYMGKDIPGSSPFPQVPVHQILPFKFKSLLFTVSFLKLLSYLRVVETSYLKFGKLTGWISLDKCS

SEQ ID NO: 3340 - protein, 524 aa, Unknown
  Description of Unknown: uncultivated organism sequence
  Category: MG91 effectors
  Description: MG91-532 effector
MEEVFVLELPLQVEKYQADILNKRYEQLRQLYNYVQGKLLRQYKYFEQMSEFQACKTIREKRDFFRSHPFHINGHLAGDKELPEITFDEYGIKGFVEKLAQKSVGPNMTYADLGFTTYILDHLGASIWSAWDKKLYDYRAKRISFKKYGEQDSFSSRRKVVRGKVYFSGLELHLDTMELAIKLNGKVGKEAKFVTLRILHNPKHADYEMWALKGGLDSVKVVKVVRRFVRGQYKYYVQLSIESEKPQKGRTLGKGNVGIDIGPTTVAVSGENIACIDKLASNCDNIQEEITRLARKIDRSRRANNPQNFNEDGTIKRGVRLVWNDSKRYKALRREMAELQRRQAAIRKQQHIDRANELLKEGDTFIVENNQISGWTRKAKETKVNEKTGKIQKKKRFGKSVANHAPAMFVTILENKVKSLGGEVVKVDTQNAASQYDFTNGEFTKHELGERTVTLSNGDTHQRDMLAAFNLQHLKYDAPEKKQYDTKAMAQHYERFCELEQEEIMRYKNKEKKDDHSTIGAEKL

SEQ ID NO: 3341 - protein, 467 aa, Unknown
  Description of Unknown: uncultivated organism sequence
  Category: MG91 effectors
  Description: MG91-533 effector
MGSCSENARHGRVADRKSHADVASGRGHLLGINECQKLASRAWISVERHLYNGGAPRFISSRRGLHSIEGKTNRTGIIWKADQQCVTVCKHVYRVRVDKRDDWLTRALQDPTDPTKPRKVKYCRIVREMRKGKERFFLQLVAEGSSPLKHAYAGKDLRMAIDPGLGSLTYATEDGTIAKVQIAPSADTDHRAVRKLQRAMERSRQATNPDNYETVEVVRHGKKHKSLKVKSGRLQWRFSKRYEKLRSELAEMLRLCAATRKREHGEVCNWLLGHAGHIIVEDNSYKAFQRGRFGKTIGRHAPAALYAQLTNKAESAGLLVEVVSPKKLKPTQHNLLTGQFVKHELWERRVRLGNEDDDRWIDRDAAACLNLLYADLEKQTYAPERIREAVPAGVTARLDAGVVVIQAREGITDREFGRFRRRGIPSLTVQGLRQQGFRGRSDSKSGATPRRKASTVSKPSHFSGEVV

SEQ ID NO: 3342 - protein, 524 aa, Unknown
  Description of Unknown: uncultivated organism sequence
  Category: MG91 effectors
  Description: MG91-534 effector
MNEVFVLELPLQVEKYQADVLNKRYEQLRQLYNYVQGKLLRQYRYFEQMKEFQACKTIKEKRDFFRSHPFQINETLKGNKIPFMVSFDEYSIKGFVEKLAQKPVGANMTFADLGFTTYILDHLGASIWAAWDKMLYDFKAKRISFKKYGELDSFSSRRKLVGGKVYFSGMEVHLDTMELAIKMNGKVGKEAKFITLKILHNPKHADYELWALKGGVNSVKVVKVVRRLVRSQYKYYVQLTIEGEKPQKSRRLGKGNVGIDLGPTTVAVSGVNVVSIDKLASKCDDIQEEITRLSRRIDRSRRANNPQNFNENGTIKRGIKLVWNDSNRYKELRRELAELRRKQAAIRKQQHIERANALLKEGDTFIVENNPISSWTTRAKETKVNEKTGKIQKKKRFGKSVANHAPSMFVSILENKVKSLGGDLVKVDTKNAASQYDFTNNSFTKHELKERNVTLSNGDTHQRDMLAAFNLQHLQYDEKDDKQYDTEAMTADYERFCQLEQEEILRYKNKEKKDDRGTIGAEKL

SEQ ID NO: 3343 - protein, 1358 aa, Unknown
  Description of Unknown: uncultivated organism sequence
  Category: MG91 effectors
  Description: MG91-535 effector
MEKEYYLGLDMGTNSVGWAVTDDAYNLIRFKGKDMWGIREFDEANPAVERRTHRTSRRREQRNAVRMGLIRSYFADEIQKVDSNFYQRLDNSFFHVEDKQDNVKDKNGIFNDKNYKDADYYKQYPTIFHLRKELIEDASQKDVRLVYLAVANMFKHRGHFLLSGIGSESSKQTITDLYNQVTGLITEEYGISLKTDIAGTDFEQVLCSREYSRTRKSEKVCEILEIKNSDKLKKAFVKSMCGLSVKITDIIDDTFTEISDEDKKITFSFVDSDYDEKAGVLEEKLGTDVYDIISKLKEIHDKAQVAEIMKNYQYLSFARVADYEKHKKDLKILKRVVKKYFEPTVYDKLFRSEENGTYSAYVNSFNSEEKSRRNYKERKQEDLYNSIKKLLKSVDNVDDTDIEYIKNEMDKENFLPKQLTFKNGVIPNQIHASELKAILKNAEKYLPFLNEKDESGYTVSERILMLFSFQIPYYVGPVSSNSNGWVKRLEPGQVLPWNIDKKIDLKETSEQFIQRMVRNCTYIAGEKVLPKDSLLYENFKVLNEINNLSINGERITVNLKQDLYNTLFLKGKRVTRKQIFNYFHSRGLVEEDSQISGIDIAVNNSLSTYGKFLPLFGEHLKEDKYKKMVDDIVFWCTVYGDSRKFLREQLEEKYSDVLDENQIKRITGMKFKDWGNLSKEFLELSGCCKSTGEVMPLIRAMWETNYNLMELLHSEEFTYSEELEEKQGKIEKVLSEYTIDDLNEEYFSAPVKRMVWQTLLIIKEIEKIMKCPPTRIFVEMTRKDDEKGDNGRKSSRKDQLLALYKKIQSEDKEWKKEMSSRIEDYDKKGALRSKKLYLYFIQKGLDMYTGKPIDLDNLMSANSNYDIDHIYPRHFVKDDNINNNLVLASKPANAEKSDIYPIKDSIYQKMKYTWKVLRDEGLITEEKYKRLTGRNPFTDEQKAGFIARQLVETGQGTKGVADLLTALLPDTKLVYSKAGNVSDFRKRYDIPKSRLINDFHHAHDAYLNIVVGNIYFTKFTSNPLNYIRKECSSKDNKYQYNLGNMYKWDVKRDGKTAWVAPEEGETGTLATVKKMLSRNTPILTRLTIEGHGGIADATLYSHKKAKQDTYIPLKSSDARMADVTKYGGYSSVTTAYLFLVEHEIKGKKIRTLETVPIYLKDRLENSKEKLEEYCRETLGYTNPSVRMKKIKLQSLIKLNGYYMQISGRTGNRFTLRNYVQLCLNGKWVDYIHKLEKYQDKGVIDDLITDERNVELYNVLCEKHSVGIFTLRPNLVGDKIKNGYDKFVNLTTEEQIKLLIEIIKLTCVGIVSANLTLIGGAAISGKMLMSKNITDANECILINQSVTGLYENRIDLLRV

SEQ ID NO: 3344 - protein, 1352 aa, Unknown
  Description of Unknown: uncultivated organism sequence
  Category: MG91 effectors
  Description: MG91-536 effector
MTAFKYYLGLDMGTNSVGWAATDPEYRLLKAKGKDLWGIREFNEASGAVERRTHRISRRRRQREQVRIGILKDYFHDAICEVDPSFFRRLENSKYHEEDKDVEVRYKNNIFNDGNYTDKDYFNEYPTIYHLRNELISSTEKHDVRLVFLALLNMFKHRGHFLNAGLGENNGESNIDNAYFELTELLSELTEYHLSQDIDCKQIEAILSRRDMSRTHKAEELAGVLHVDLKNKPYKELIRGLCGLKFNACVVFPDVQSEEVTKLDICLSESTFDEKSDEIANIIGEDYFEIIMAMKEMFDIGSLASIMKGHNYLSQARVASYTKHKEDLKLLKEVIKKYCGKKEYDKFFNSDADGSYASYVGSYNSKNKERRVGNKRTSEELYKEIKKLLKDAQKEDENVQKILTSIENETFLPKQLTASNGVIPNQVHAREMKKILSNAENYLPFLTEKDETGLSVSERILKLFTFQIPYYIGPTSENSGKNGGNGWVVRREDGQVLPWNIDEKIDMKATSEAFISRMVRRCTYISGEQVLPKASLEYQSYCVLNEINNIKIDGERISVELKQDIYKAVFQKGKKVTKKQLCKYLHTRGIIETEEQVTGVDVSINNALTTYGKFKPIFGEDISKDSVQKMIEDIVFWCTVYGDSKKFLKDRIEEKYGNKLSEEQIKRILGFKFKDWGNLSKKFLELNGADTSTGESISIIRALWNNNLNLMELINSSLYNYKECLAEYQNTMLKTLSEIEAEDLNEYYFSAPVRRMIWQTILVIKELVKVLGCEPERIFVEMTRKPDEHKTRTSSRRNKFEELYKKVKDETTDWMQVIANAEEDGKIRSKKMYLYLTQKGRCMYTGKHIELDDLFDNNLYDIDHIYPRHFVKDDNIDNNLVLVCKEKNAHKSDHYPIEEEIFLSQKKMWLELRKSGFITEEKYNRLMDRNPFSDEQKAGFIARQLVETSQGTKGVANILRQLLPGSKIVYAKASNVSEFRHTRDGIPKSRLVNDFHHAHDAYLNIVVGNVYYMKFTQNPLNFIKKDYDNYKEDYNLSKMFDWDVKRNGEVAWIAQRKDGEAGTITTVKKMLSRNTPLMTRYSFEGKGGLANETLYSAKKAKGEGYIPFKSSDDKMQDVTKYGGFTSVTGAYFFLVEHTEKKKRIRTIESVPVYLAQKIEQNPDELKKYCEEILGLIDADIRLKKIKIGSLIKRNGYFCYITGKTGKQLIVRNAVNLCLKNEWIKYISKLEKVKEKDAVDKIITKEKNEVLYSELIQKFKHGIFSKRPNPVGDKLEKGSEKFSNLSIKEQCAVLCQILQLAAVLGSECDMTLLGESAHCGKMLISKKIGDEEIYLINQSITGLYEKKINLHTV

SEQ ID NO: 3345 - protein, 510 aa, Unknown
  Description of Unknown: uncultivated organism sequence
  Category: MG91 effectors
  Description: MG91-537 effector
MREQVLSYELTLPQRIYSHLDRLFSVFKNQVNSYIPRLWNEKGFELLSQKGSAMGILKEVFSTPQGLPSRVFRNVLELTGQIVRSQIKRKEIFESLLKGEEVTGYDENFLLNVKRQLEKLKKKGKEVNSYFDFPYPKFNGQVVITSADDNLEKGQFKRLRISGSFLEFSIKVPTQDGWKWIKVRKLLPNRLRKALLKAKKIEAPLIKKQRLKSGYTVYRLVIPLSFEVTEPKEIDRVLALDLSSQEKRLGVAVIMDKEFVSKPIFFKTELIRKVERIYKETCNLERKIDDVYNAIRNTGSRKVKQELAKRLNHLFGEQKRKQRKCKELRKQILENFTNFVIAHAKAYHCQVIAIENLAFKEVPNWQSSKALRLFTQWFYSRFTKRLEEKARVSGLKVLKINPANTSRICAKCGKEGRLEKLTFECSCGTYDRDYNASLNVAQRALRLTKSRAYTVRDIPGRIPSRLVRAEGLALLTVISLFKLLAWLKVVQTCYLKPQNLIRWINSDKYD

SEQ ID NO: 3346 - protein, 528 aa, Unknown
  Description of Unknown: uncultivated organism sequence
  Category: MG91 effectors
  Description: MG91-538 effector
MNEVFVLELPLQVEKYQADVLNKRYEQLRQLYNYVQGKLLRQYRYFEQMKEFQACKTIKEKRDFFRSHPFQINETLKGNKIPFMVSFDEYSIKGFVEKLAQKPVGANMTFADLGFTTYILDHLGASIWAAWDKMLYDFKAKRISFKKYGELDSFSSRRKLVGGKVYFSGMEVHLDTMELAIKMNGKVGKEAKFITLKILHNPNHADYELWALKGGVNSVKVVKVVRRLVRSQYKYYVQLTIEGEKPQKSRRLGKGNVGIDLGPTTVAVSGVNVVSIDKLASKCDNIQEEITQLSRKIDRSRRANNPQNFNEDGTIKRGIKLVWNDSNRYKELRRKLAELRRKQAAIRKQQHIERANALLKEGDTFIVENNPVDAWVRRAKETKVDEKTGKYKSKRGSGRSVGNHAPAMFVDILENKVKSLGGRFERVNTQNAASQYDFTTDSFKTGEEKHKLNERAITLSNGDTHQRDMLAAFNLQHLKLDEAKTKQYDTEAMAADYERFCQLEQEEILRYKNKVKKDDRGTIGAEKL

SEQ ID NO: 3347 - protein, 497 aa, Unknown
  Description of Unknown: uncultivated organism sequence
  Category: MG91 effectors
  Description: MG91-539 effector
MPSPTFIIELPIRVSDSESRTILRKLEFARQLHNATLGTALGKLQQLRQDSEWKRACLMPKGKERSELFRKLDRKYQLTEYDLHTVIAKHRQRSGRKTELGINETQKIATRVFQAVNRYKLGLGGRPRFKSLSRGLRSIEGKSNKTGLKFNIEKSVLSWCKHDYRVFIDPQDDFLQRALRSEGRSGFKKVKYCRLVRKTIKGKNRFYLQVVLEGQAPIKHIYASTSERLSIDPGPQTIAVFSDVWAGKIKVSPTAQVDEKRLRCIQRSMDRSLKKSNPDCYESDGTLRKGCVLKKTKGYEKRIQRLQECHRKAAATRRCEHGQLINLLLSMAGDIRVEKNQWKAFQRGHFGKSLGKSGISGFIERLKSKAESAGLKVTEVKPYKLKLSQYDPYTDQYRKKSLNERWHSLGESSEWIQRDVMSALLLQCADLEEEKHIPTEVIKTLEGVKQLLRDAGYVILKPSSNGESNPTFASEPKAVTPEKVRLEIFCGASDSYL

SEQ ID NO: 3348 - protein, 1353 aa, Unknown
  Description of Unknown: uncultivated organism sequence
  Category: MG91 effectors
  Description: MG91-540 effector
MEQKTYYLGLDMGTNSVGWAVTDENYNLLRAKGKDLWGIREFESASGAIERRAHRVSRRNRQRQQVRVGKLNCYFEDAINEVDPNFYARLRNSKYHLEDKEEAVRTPNGIFNDPAYKDKDYYAQYPTIYHLRKELLTNDEPHDVRLVYLALLNMFKHRGHFLNAALTSEGTRHMQDAYNSFQENVYEMCDLSFPDVDGKEIEAVLSNRDLNRSRKSEALMELFHFTKKENKTELEFVKGMCGLTTEASKLFGDLGLEEKVEICFSKASYEDRIPDIMDAVGEENFRVLENLKEIADIGTLAGVLKGYTYLSEARVAEYEKHKSDLKLLKSVIRQYGTQEDYNKMFRSEESGTYSAYVNSYNSGKKQRRDMKGRTREDFYKSLKKLLKGMPEEDENVAQILAEIDKEKFLPKQLTASNGVIPNQVHLKEMKAILRNAEQYLPFLKEVDESGLTTSERIWRLFSFQIPYYVGPVTPNSSRDGGNGWVVRKEEGEVLPWNINEKIDLPATQDAFIKRLVRECTYISGEKVLPKGALIYEKFAVLNEINNIRIDNERLDTPLKQAIYNDLFCTGKRITRKKILDYLSAQGKLKNESQLTGIDKNINNSLSSYGKFLGVFGEDLKKDHYIDMSEDIIYWCTVYGDSKKVLRSLLEEKYQGELTEKQMKRILGFKFGDWGRMSREFLELEGIDKETGEVVTLIHAMWDNSMNMMELIHSDRFTFAESLESKKTKMDKTLSEFKHEDLDEYYFSAPVKRMIWQTLLVIKELEKVLGGPPTRLFVEMTRSDDVKGDKGRKKSRKDELLELYKKVKDESHDWTAIINAADENGTIRSKKMYLYLTQRGRCMYTGKPIDLNQLFDNNIYDIDHIYPRHFVKDDNLRNNLVLVDKRANARKSDNYPIESNIRCNDSIKALWYSLKKEKLISEEKYRRLTGSNPFSDEQKAGFIARQMVETSQATKGVNDLLKQLLPETELVYSKASNVSDFRRDYDLLKSRTINDFHHANDAYLNIVVGNVFLVKFTNNPRNFIKEYNRDKYTYGYNLGRIFERDVKRGDQVAWIADDRNGNHGTIETVKKMMAKHTPLLTRMNFVNNGQISKGTLYSKFKAKPDTYIPLKETDEKMRDISKYGGFTNVSTAYFFLVEHGKANKRIRTIEAVPIYMKSRLENNEEELKKYCVEQLGLLDPSIRLNKIKIQSQFRINGFYVFFRGKTGHELLWGNNTSLCLEPKWNNYISYLDKYAKNGYMNRFITKEENEHLYSELLKKHSEAIFSKRPNSFSKIVIAGQEKFKDLDIEKQCVALSQLISATSIGSSIADVTMIGGTAQTGRMRTNKKISGYELVLINTSATGLYKTEIDLNKI

SEQ ID NO: 3349 - protein, 530 aa, Unknown
  Description of Unknown: uncultivated organism sequence
  Category: MG91 effectors
  Description: MG91-541 effector
MTSPSFVIELPIAVDDAEMRTIVRKLEFARQLHNATLGTAMGQLQLMRQDAAWKEACVMPKGKERAAAFRALDRKYGLTEYDLHSVIARHREGTGRKAELGINETQKIATRVFQAINRYKLGLGGMPRFKSFKRGLHSIEGKTNKTGLKFKPEQKVLNWCGHDYRVLIDPKDNYIQRALKDNERSDQYRKIKYCRLVRRRIRSADRFFLQVVLEGTAPVKHVYAPVTERAAIDPGPQSIALFSKAFAGKIQVAGSNNFNEAASRRLLRAMDRSLRRNNPDAYNENGTIKKGAKLVKSKNYQRKVDRLREMHRVAAAERKCRHGQTINLLLSIAGDIRIEKNSWKAFQKGHFGKSLGKSAMSGFIAQLKSKAASAGLKVTEVNPYKLKLSQYDPYTDTYRKKDLSERWQEMKAGSGQYIQRDVLSALLLYCANIEKEIHIPKVAVEQLEGAKQFLTDAGYVVLKSTSSRDQRDPRLASEPKAMTPEMARQKILRGAGDSHLPTDQELGRIRAGGKVSTWSKETFPLQRGVV

SEQ ID NO: 3350 - protein, 530 aa, Unknown
  Description of Unknown: uncultivated organism sequence
  Category: MG91 effectors
  Description: MG91-542 effector
MTYQSFVIELPIAVDDAEMRTIVRKLEFARQLHNATLGTAMGQLQQMRQDAAWKEACVMPKGKERAAAFRALDRKYGLTEYDLHSVIARHREGSGRKAELGINETQKIATRVFQAINRYKLGLGGMPRFKSSKRGLHSIEGKTNKTGLKFRPEKKVLNWCGHDYRVLIDPKDDYIQRALKENERSDKYRKIKYCRLVRKRIRSSDRFFLQVVLEGTAPVKHVYAPVTKRAAIDPGPQSIALFSKAFAGKIQVAGSNNFNEAASRRLLRAMDRSLRRNNPDAYNENGTIKKGAKLVKSKNYQRKVDRLREMHRVAAAERKCRHGQTINLLLSIAGDIRIEKNSWKAFQRGHFGKSLGKSAMSGFIAQLKSKAASAGLKITEVNPYKLRLSQYDPYTDTYRKKDLSERWQEMKAGSGLYIQRDVLSALLLYCADIEKEIHIPKVAVEQLEGAKQFLTDAGYVVLKSTSSRDQRDPRLASEPKAMTPEMARQKILRGAGDSHLPTDQELGQIRAGGKVSTWSKETFPLQRGVV

SEQ ID NO: 3351 - protein, 607 aa, Unknown
  Description of Unknown: uncultivated organism sequence
  Category: MG91 effectors
  Description: MG91-543 effector
MAKEEFVLTLPLKVEKWQADILDKRYEMLRQVYNMVQQKLVRQYIYFSQQKAYRDCKNFEQRREFFANNPFHIKGVKGKNDELCDIKFPYTFKSRGGTSGKRVPNGISDYVSKLWSHKIGQDKTLADFGINSYIMEELGLHIMKAWEDRLYKPRSKRVSFKDYGEINSLGSRNKNGNIAGFTINLDEGYITYKTNGRLGQFADFIQLPIDFSREKNGYAKEALKGGIDSLKKLLIVKRCVRGENKYYLQLTISGEKPQKGRTLGKGNVGIDIGPSTIATSSLKGVHFDKLADKCDNIEHELYLINRKLDRSRRANNPQNYNEDGKIKRGIRLVWKKDKDVKRYATLKQQRKELYRKQAEIRKQQHLEMANAMLSQGDTFIVENNPVDAWVRRAKETTKTKTGKNRCKKRYGKSVANHAPSMFVSILKNKVLSLGGKFYEIDPRNAATQFDFTNGEFTKHEVCERSITLSNGCTHQRDMLSAFNLQHIVLQSKELKEYDIEQMKADYPIFCRLESSEQERFRIAWHNERDALYFVGASEKQMRRQPQEKSVANRHNGVVGRKYCNTSLEGENAKITGSGLVRESIERVSQIPDECHPFGGAPIVLDGL

SEQ ID NO: 3352 - protein, 601 aa, Unknown
  Description of Unknown: uncultivated organism sequence
  Category: MG91 effectors
  Description: MG91-544 effector
MIEEFVLTLPLKVEKWQADILNNRYEHLRRIYNMVQRKLLRQYIYYSQQSEYRKCKSNDEKRDFWENHPFTIKGIYDQKGNSSIVKFPYTYSSRSKNSGKRASNGISDLLPKLKHYNIGGGKTYGSLGLNASILENLGLSVQQAWEKRIYNSKSKHISFKKEDELNTFGCREKDGFSGFVLDLSKMELSFNTNGLHGKKAEFIHLPINPNKKFTQYEVEALKGGPESVRKIVISREYIRGAYKYYVQLTIRGEKPQKNRTLGKGTVGIDVGPSTVAVSSLYGVALNKLADKCDGIEHDLWLVNRKMDRSRRATNPDFFAEDGTYIKRKKGERRIWNFSNRYKNLKSVRRELYRRQAVVRKQQHIAMANEMLSQGDTFIVENNPVDSWTRRAKETKKNKKGKMRCKRRFGKSVAHHAPAMFVSILQNKVRSLGGEFHKVDIKIAATQFDFTNGEYKKHELKERTVTLADGKTHQRDMMAAFNLQHFRADSSEDYDIEQMILDYPVFCKLEEQGIANYIESKGEEKDTAYFAGKSSKELKRSSNRHNGGVERKHCNIHERKGDAAESGKKTLFGGISESLESVPDVPNECHHLGHQHLRLDEP

SEQ ID NO: 3353 - protein, 448 aa, Unknown
  Description of Unknown: uncultivated organism sequence
  Category: MG91 effectors
  Description: MG91-545 effector
MKTAATPSFVAELPLRVGADVEALLERTFDFARNLYNATLGTVLGRYQALRESQAWQLARAVPKKEAGEVFNRLMRQAELTKSGFEKILNKHRHSSGRAEQLDSNSGQKIADRLWDAFMRYRTRQGGKPRFKSERRGIHSIEGKTNTTGFRWKAQEGCVRWGKRRLPVIVNKQDDWLMRALADPVDPSKPRRVKCYRILWRKFGGRKRWFVQLVCEGVSPVKHIFAPTELKAGIDPSTKSMTVAYACGTVEKIDLATPLKKADREIRLLQRKLDRSRRATNKDNYNEDKTVKKGASGWVYSKHYEKIRTVYADAQRRAAAHRKCVCNEAVNWVLGQAGCIIVEKNNFKAFQKSRYGKSISKAAPGQFVTNLNVKAVSAGLKVFIVPPYELRPSQHDIETGQYVRHELCERWVKLGQSGLWLNRDALAALNLLWLDDAATRYSAARRSE

SEQ ID NO: 3354 - protein, 519 aa, Unknown
  Description of Unknown: uncultivated organism sequence
  Category: MG91 effectors
  Description: MG91-546 effector
MTSQTFILELPIKADDSQSRTIAKKFEYGRMLYNATLGSGLGRLTQMRQDPEWRRACEMSKGKERNELFRRLNRKYRLTEYDFHADIARHREGTKRKSELGINEAQKLATQAFSAVSRYMYKQGGRPRFKSFKRGLHSLEGKTNKTGLKFRPEKMLLDWCRKSYQVMLDSDDAFILDALYADKERTHFKRIKYNRIVCRNIKGVKRFYLQVVLEGTPPVKHAYAPATERMAIDPGPKSFAVFCPRVQAKVQVAPGAKVNEKAIRRIQRSMDRSLRASNPKAFDEKGRIKSGVGLTYSKGYQARVDKLREAHRRATGTRKCEHGELANLLLECAGNIRIEKNSWEAFKRSHFGRSINNSAASGFIQRLKSKAERAGLTVEEVSPYRLKPSQYDPYKDEFMKKALGERWMYLGDETTVIQRDIMSAILIYFADLKNQTHNPEVVKAALEGLKRGLTDAGYVKQLKLPRSSGSQDPLFAPEPKALTTEELRSKCFRAGSDRHSSTLNGTDGKAVGWSETFPL

SEQ ID NO: 3355 - protein, 1353 aa, Unknown
  Description of Unknown: uncultivated organism sequence
  Category: MG91 effectors
  Description: MG91-547 effector
MEQKTYYLGLDMGTNSVGWAVTDENYNLLRAKGKDLWGIREFESASGAIERRAHRVSRRNRQRQQVRVGKLNCYFEDAINEVDPNFYARLRNSKYHLEDKEEAVRTPNGIFNDPDYKDKDYYAQYPTIYHLRKELLTNDEPHDVRLVYLALLNMFKHRGHFLNAALTSEGTRHMQDAYNSFQENVYEMCDLSFPDVDGKEIEAVLSNRDLNRSRKSEALMELFHFTKKENKTESEFVKGMCGLTTEASKLFGNLGLEEKVEICFSKASYEDRIPDIMDAVGEENFRVLENLKEIADIGTLAGVLKGYTYLSEARVAEYEKHKSDLKLLKSVIRQYGTQEDYNKMFRSEESGTYSAYVNSYNSGKKQRRDMKGRTREDFYKSLKKLLKGMPEEDENVTYILAEIDKEKFLPKHLTASNGVIPNQVHLKEMKTILRNAEQYLPFLKEVDESGLTTSERIWRLFSFQIPYYVGPVTPNSSRDGGNGWVVRKEEGEILPWNINEKIDLPATQDAFIKRLVRECTYISGEKVLPKGALIYEKFAVLNEINNIRIDNERLDTPLKQAIYNDLFCTGKRITRKKILDYLSAQGKLKNESQLTGIDKNINNSLSSYGKFLGVFGEDLKKDHYIDMSEDIIYWCTVYGDSKKVLRSLLEEKYQGELTEKQMKRILGFKFGDWGRMSREFLELEGIDKETGEVVTLIHAMWENSMNMMELIHSDRFTFAESLESKKTKMDKTLSKFKHEDLDEYYFSAPVKRMIWQTLLVIKELEKVLGGPPTRLFVEMTRSDDVKGDKGRKKSRKDELLDLYKKVKDESHDWSAIINAADENGTIRSKKMYLYLTQRGRCMYTGKPIDLNQLFDNNIYDIDHIYPRHFVKDDNLRNNLVLVDKRANARKSDNYPIDSNIRCNDSIKALWYSLKKEKLISEEKYRRLTGSNPFSDEQKAGFIARQMVETSQATKGVNDLLKQLLPETELVYSKASNVSDFRRDYNLLKSRTINDFHHANDAYLNIVVGNVFLVKFTNNPRNFIKEYNRDKYTYGYNLGKIFERDVKRGNEVAWIADDRNGNHGTIETVKKMMAKNTPLLTRMNFVNNGQITKGTLYSKSKAKQDTYIPLKESDEKMRDISKYGGFTNVSTAYFFLVEHGKANKRIRTIEAVPIYLKSRLENNDEALKNYCVEKLGLMDPSIRLDKIKIQSQFRVNGFYVFFRGKTGHRLIWGNNTSLCLEPKWNNYISYLEKFEKNGNMNRFVTKEENEHLYSELLKKHSQAIFSKRPNSFSKIVIAGQEKFKDFDIEKQCVALSQLISATSIGSSIADMTMIGGTARTGYMLTNQKISGYELVLINTSPTGLNKTEIDLNTI

SEQ ID NO: 3356 - protein, 514 aa, Unknown
  Description of Unknown: uncultivated organism sequence
  Category: MG91 effectors
  Description: MG91-548 effector
MNNETFIMELPLIVEKFQSDELDKRFEILRRIYNMAQNKLERQFCYLSKFKEYQECTTKKAKGEFIKKHPFSFKDILDKSGNPLMITFTKYDIQGYLSKFAKLKIDSQYTYSDMGINTPMLMHMGMAIWSAWEKVIFDSKADKISYKKYGDLKSIGVDWEPKHPAGFILDLQKGELKLNLNNRQGQYARYITMKIRFGRKEHQVWYEGDALNAGEDSIRVLTIVRRKIRGRYNYYLQMTIRNNKPQKGRTLGEGRVAIDLGTSKIAVVTKDKVHLLPLSPSILSISDELRIIQRQMDRSRRANNPQKFNEDGSIKKGNHDKWVNSKEYIRLRNMKAELERKQAAVRKQDHIALANYLLSLGNEFVIEDNDVQEWVKRKKEEKRRKSDGKNLSKAGLGKQVGNHAPSMFVTILKNKVESLGGTFVRVDNNNRATDYDFTNNTFNEHKLEERYITLGNGNRHQRDTLAAFNLYHLDTAPEKEKCYHLYEMRKHYAQFCESEKEALLRWKGMTPKRE

SEQ ID NO: 3357 - protein, 422 aa, Unknown
  Description of Unknown: uncultivated organism sequence
  Category: MG91 effectors
  Description: MG91-549 effector
MERHLYNGGSPRFISSRRGLHSIEGKTNRTGIIWKADQQCVTVCKRVYRVRVDKRDDWLTRALQDPTDPTKPRRVKYCRIVREMRKGKERFLLQLVAEGTSPLKHAYAGKDLRMAIDPGLGSLTYATEDGTIAKVQIAPSADTDHRAVRKLQRAMERSRQATNPDNYETVEVVRHGKKHKSLKVKSGRLQWRFSKRYESLRAELAEIFRLSAATRKREHGEVCNWLLGHAGHIIVEDNSYKAFQRGRFGKTIGRHAPAALYAQLTNKAESAGLLVEVVSPKKLKPTQHNLLTGQFVKHELWERRVRLGNDDDDRWIDRDAAACLNLLYADLEKQTYAPERIREAVLAGVTAWLDAGVVVIQAREGITEREFGRFRRRGIPSLTVQGLRQQGFRGRSDSKSGTTPRRKASTVSKPSHFSGEVV

SEQ ID NO: 3358 - protein, 524 aa, Unknown
  Description of Unknown: uncultivated organism sequence
  Category: MG91 effectors
  Description: MG91-550 effector
MNEVFVLELPLQVEKYQADILNKRYEQLRQLYNYVQGKLLRQYRYFEQMKEYQACKTIKEKRDFFKSHPFQINETLKGNKTPFTVSFDEYSIKGFIEKLVQKQVGPNMTYADLGFTTYILDHLGASVWAAWDKKLYDFKAKRISFKKYGELDSFSSRRKVVGGKVYFSGMELHLDTMELSIKMNGKQGNNAKFITLKMLHNPKHAEYEIWALKGGVDSVKVVKVVRRLVRTQYKYYVQLTIEGEKPQKGRTLGKGNVGIDLGPTTVAVSGEHIVSIDKLASKCDNIQEEITRLSRKIDRSRRANNPQNFNEDGTIKRGIKLVWNDSKRYKEMRRELAELRRKQAAIRKQQHIERANALLKEGDTFIVENNQISSWTTRAKETKVNEKTGKIQKKKRFGKSVANHAPSMFVSILENKVKSLGGEVVKVDTKNAASQYDFTDNSFTKHELKERNVTLSNGDTHQRDMLAAFNLQHLKYNEPEAKQYDTEAMVADYDRFCQLEQEEIQRYKNKEKKDDRSTVGAEKL

SEQ ID NO: 3359 - protein, 607 aa, Unknown
  Description of Unknown: uncultivated organism sequence
  Category: MG91 effectors
  Description: MG91-551 effector
MIEEFVLTLPLKVETWQADILNKRYEHLRCIYNMVQRKLLRHYIYLSQQNEYRQCKDNDEKRTFWENHPITFKDFCDKNGNPAIVKFPYTYSHRSKDSGKKASNGISDFVPKFKNRNIGGGLTYGSLGINASILENLGLRIEQAWKKRLYDPKSKHISFKEEGDLNTLGCREKDGFSGFVLDLQKMMLSFNTNGRRHGSAEYIHLPIKPSKLTKYEKFVIDALKDKLSSVRKIVVAREYVRGKYKYYVQLTIKGEKPQKNRTLGKGTVGIDVGPSTVAVSSLQGVSLDKLADKCDNIEHDLWHINRKMDRSKRDTNPDFFNEDKTYKKPEKGERRKWTFSNRYKRLKLERRELYRKQAAIRKQQHIEMANALLSQGDEFIVENNPIDSWAKRAKETKRGKNGKIRCKRRFGKSVAHHAPAMFVSILQNKVRSLGGSFHKVEIKNAATQFDFTNGEFTKHELNERTVTLSNGRTHQRDMLSAFNLQHLRPDSEETKNYNIEQMEADYPVFCKLEEKGIAQFKEKRQQERDVAYFTGVSHKTLKFSSANRHNGGVGRGNCNYHAGSKRNVAKTGNKSSSKENCESMETVSLVPNEYHHSNHQHLRLDGL

SEQ ID NO: 3360 - protein, 342 aa, Unknown
  Description of Unknown: uncultivated organism sequence
  Category: MG91 effectors
  Description: MG91-552 effector
MRAAFSFCAIAETLGSEIVVENDNVTVKPNNARSKEILQACVIDGLKIQYDEMRHWIKELYPSLMSSCTSKIGYVIGKMMTMKDQDIKKCQKKFLIVNGKRAFAQFNRSGIPLKSGMAKIDGHLLKCRWDKDIGEVEFTTNKMDSSTYYAFSSLREARDGWNIKDSYLSFDEDKNKIIVILSYERPDTPSKVNADKVMYVEFTDDKEKFITCYTDNKWSARPFSAAGIVGYLEEMERIYSRYWSEFKSYERREIKQRKHVKEKLNRYTERRANAEKNNNHLWSKRIVDFSRQQCAGKLFVVNLPEKTLFDLPYGWFDLKTKLDYKMKEIGGTVSFVSVDKDK

SEQ ID NO: 3361 - protein, 537 aa, Unknown
  Description of Unknown: uncultivated organism sequence
  Category: MG91 effectors
  Description: MG91-553 effector
MSTKSFIISLPIITGDQDRRRLQKSFSFGCNLQNAVMGGGWDRVLKMRATAEWQTARAMPKSSERTKAFRDLRVHFRLSEYDFHADVAKHRKASGRCHLLGINESQKLASRAWISVERHLYNGGSPRFISSRRGLHSIEGKTNRTGIIWKADQQCVTVCKRVYRVRVDKRDDWLTRALQDQTDPTKPRKVKYCRIVREMRKGKERFLLQLVAEGTSPLKHAYAGKDLRMAIDPGLGSLTYATEDGTIAKVQIAPSADTDHRAVRKLQRAMERSRQATNPDNYETVEVVRHGKKHKSLKVKSGRLQWRFSKRYESLRAELAEIFRLSAATRKREHGEVCNWLLGHAGHIIVEDNSYKAFQRGRFGKTIGRHAPAALYAQLTNKAESAGLLVEVVSPKKLKPTQHNLLTGQFVKHELWERRVRLGNDDDGRWIDRDAAACLNLLYADLEKQTYAPERICEAVLAGVTAWLDAGVVVIQAREGITEREFGRFRRRGIPSLTVQGLRQQGFRGRSDSKSGTTPRRKASTVSKPSHFSGEVV

SEQ ID NO: 3362 - protein, 484 aa, Unknown
  Description of Unknown: uncultivated organism sequence
  Category: MG91 effectors
  Description: MG91-554 effector
MAHKENQKAFVVTFPLHTEKWQEDRIDKMMRMLTTFYNDRQRKLVRRYIYLSHSKAYKEAKGKGVVAFKNYMKENGFSQYGLDAFFKADTKGALYQCGLNSMFLQYLSQCAWSAWDKKLFGKGDFVKTDKVVNIFCSRNMKGRFCGFDYDLSTFTIRIKSTCTKKIICTIPFVVNKNSEYELYALSQKICRIGIVRKLIRSKYKYYVQFTFDGVPYNKGRNIGTGIVGIDPGPSKIAIVSDEKVEIAKLAPGIEEDERKTARLRRKLDRSRRATNPHMYKEDGTIIKGQRQTYFSKVYNETRKQLADAQRKLAAKRKIAHNELANTLLEYGDTFKVEANSYKSMQARTKATSMTKSGRIRSKKRYGKSINNRAPSEFLVILKNKLLYYPKGKYYDVPSSYACTQFDFTNESFTEHKISERRIVTSDGIQHNRDTLAAFNIKNAIVNDTSTKKKKITKSKEFFDIVKMKASYNEFCVKERYLLSV

SEQ ID NO: 3363 - protein, 634 aa, Unknown
  Description of Unknown: uncultivated organism sequence
  Category: MG91 effectors
  Description: MG91-555 effector
MPVTSQSFVIELPIAVDDAEMRTIVRKLEFARQLHNATLGTAMGQLQQMRQDAAWKEACVMPKGKERAAAFRALDRKYGLTEYDLHSVIARHREGSGRKAELGINETQKIATRVFQAINRYKLGLGGMPRFKSSKRGLHSIEGKTNKTGLKFRQEKKVLNWCGHDYRVLIDPKDNYVQRALKENERSDQYRKIKYCRLVRKRIRSADRFFLQVVIEGTAPVKHVYAPVTERAAIDPGPQSITLFSKAFAGKIQVAGSNNFNEAVSRRLLRAMDRSLRRNNPDAYNEDGTINKGAKLAKSKNYQRKVDQLHEMHRVAAARRKCLHGQTINLLLSIAGDIRIEKNSWKAFQRGHFGKSLGKSAMSGFIAQLKSKAASAGLKVTEVNPYKLKLSQYDPYTDTYRKKDLSERWQEMKAGSGQYIQRDVLSALLLYCADIEKEIHIPKVAVEQLEGAKQFLTDAGYVVLKSTSSRDQRDPRLASEPKAMTPEMARQKILRGAGDSHLPTDQELGQIRAGGKVSTWSKETFPLQRGVVQKFDDRSEGLDMQTVYLSAGYTMGPHYFAGSIGWLNAELNGSAEGYPQDDGAAFLGALVYYYSLSKRTQLYAFTSFVDGKQLLDAGTDFNQTTGGFGLMHKF

SEQ ID NO: 3364 - protein, 532 aa, Unknown
  Description of Unknown: uncultivated organism sequence
  Category: MG91 effectors
  Description: MG91-556 effector
MSTKSFIINLPIITGDQDRRRLRKSFSFGCNLQNAVMGGGWDRVLWMRATPEWQAARVMPKGSERTKAFRDLRVQFRLSEYDFHADVAKHRKASGRSHLLGINESQKLASRAWISVERHLYNSGSPRFISSRRGLHSIEGKTNRTGIIWKADQQCVTVCKHVYRVRVDKCDDWLTRALQEPTDPTKPRKVKYCRIVREMRKGKERFLLQLVAEGTSPLKHAYAGKDQRMAIDPGLGSLTYATEDGKIAKVQIAPNADTDHRAVRRIQRAMERSRQATNPDNYETVDVVRHGKKRQSLKVKSGRLEWRFSKRYEKLRAELAQTHRLAAATRKREHGEVCNWLLGHAGTIIVEDNSFKAFQRGQFGKSIGRHAPAAFYTQLTSKAESAGLQVKVVSPKKLKPTQHNLLTGRFVKHELWERRVQLGDRTGVCWIDRDAAACVNLLYADLDQQIYDPKRIREAVLAGVTAWLDAGVVVIQAREGITEREFRRFRRRGIPSLAVQGLRQKGFRGRSDSKSGAIPEAKSLGYIETFPL

SEQ ID NO: 3365 - protein, 1358 aa, Unknown
  Description of Unknown: uncultivated organism sequence
  Category: MG91 effectors
  Description: MG91-557 effector
MEKEYYLGLDMGTNSVGWAVTDDAYNLIRFKGKDMWGIREFDEANPAVERRTHRTSRRREQRNAVRMGLIRSYFADEIQKVDSNFYQRLDNSFFHVEDKQDNVKDKNGIFNDKNYKDADYYKQYPTIFHLRKELIEDASQKDVRLVYLAVANMFKHRGHFLLSGIGSESSKQTITDLYNQVSGLITEEYGISLKTDIAGTDFEQVLCSREYSRTRKSEKVCEILEIKNSDKLKKAFVKSMCGLSVKITDVIDDTFTEISDEDKKITFSFVDSDYDEKAGVLEEKLGTDVYDIISKLKEIHDKAQVAEIMKNYQYLSFARVADYEKHKKDLKILKRVVKKYFEPTVYDKLFRSGENGTYSAYVNSFNSGEKSRRNYKERKQEDLYNSIKKLLKSIDNVCDTDIEYIKNEIEKENFLPKQLTFKNGVIPNQIHASELKAILKNAEKYLPFLNEKDESGYTVSERILMLFSFQIPYYVGPVSSNSNGWVKRLEPGQVLPWNIDKKIDLKETSEQFIQRMVRNCTYIAGEKVLPKASLLYENFKVLNEINNLSINGERIAVALKQDLYNTLFLKGKRVTRKQIFNYFHSRGLVEEDSQISGIDIAVNNSLSTYGKFLPLFGEHLKEDKYKKMVDDIVFWCTVYGDSRKFLREQLEEKYSDVLDENQIKRITGMKFKDWGNLSKEFLELSGCCKSTGEMIPLIRAMWETNYNLMELLHSEEFTYSEELEEKQGKIEKVLSEYTIDDLNEEYFSAPVKRMVWQTLLIIKEIEKIMKCPPTRIFVEMTRKDDEKGDNGRKSSRKDQLLALYKKIQSEDKEWKKEMSSRIEDYDKNGALRSKKLYLYFIQKGLDMYTGKPIDLDNLMSANSNYDIDHIYPRHFVKDDNINNNLVLASKPANAEKSDIYPIKDSIYQKMKYTWKVLRDEGLITEEKYKRLTGRNPFTDEQKAGFIARQLVETGQGTKGVADLLTALLPDTKLVYSKAGNVSDFRKKYDIPKSRLINDFHHAHDAYLNIVVGNIYFTKFTSNPLNYIRKECSSKDNKYQYNLGNMYKWDVKRDGKTAWIAAKEGETGTLATVKKMLSRNTPILTRLAIEGHGGIADATLYSHKKAKQDAYIPLKSSDARMADVTKYGGYSSVTTAYLFLVEHEIKGKKIRTLETVPLYLKDRLENSKEKLEEYCRETLGYTNPSVRMKKIKLQSLIKLNGYYMQISGKTNKQFTVRNYVQFCLNSKWVDYIHKLEKYQDKGVIDDAITDEKNVELYNVLCEKHSVGIFTLRPNPVGDKIKKGYDKFVNLTTEEQIKLLIEIIKLTCVGIVSANLTLIGGASISGKMLISKNITDAKECLLINQSVTGLYENRIDLLRV

SEQ ID NO: 3366 - protein, 1356 aa, Unknown
  Description of Unknown: uncultivated organism sequence
  Category: MG91 effectors
  Description: MG91-558 effector
MGRDYYLGLDMGTSSVGWAVTDEKYNLLRAKGKDLWGIREFEEAEGGIARRQNRISRRRRQREQVRIGLLKSYFAEEIEKGDPDFLQRLENSKYHLSDKDEKVRYKSAIFNDPEYTDKDYYRDYPTIFHLRAELIHNQEPHDIRLVYLALLNMFKHRGHFLNASLSAEEETQSMSDAYTAFRALVEEVMTANETENLFFPDGKADEIEAIISSRDYNRKRKSELMTEMLGFTKKDKAAQALIKGMCGLTVDVKTVFREIESEAKLSISFSDSNYDEKIVEIQEVLDDEQLELLEAVKTIYDIGSLAGVLKGEKYLSDARITDYNKHKEDLALLKKIIRKYTDQKTYNDLFRGTEPGSYSAYVNSTNSGKKQRRNMGGNAKRNQEAFYASLKKLLNKLPSEDDDVQKILADIDKELFLPKQLTFANGVIPNQVHAREMKAILNNAEQYLPFLTEKDESGLTVSERILKLFSFQIPYYVGPVTTKSSRDGGNGWVVRKESGQVLPWNIEDKIDMDATSKKFIENLIRECTYIAGEKVLPKGSLLYERYCVLNEINNIKIDGRPIDVELKQKIFEDKFMSGKKVTRKQLVTYLHGKGVLEDDAQLTGIDKTINNSLSSYGKFLGVFGDELKKDSCQIMVEDIIRDCTIYGDSKKRLRETLQKKYVDNNNLSESQLKRILGFKFKDWGRMSKEFLEMQGINRETGEVMSLVQAMWETNLNLMELIYSEDFTFAEALQEKQAKDYLTLSEFKFEDLDEYYFSAPVKRMVWQTLLIIKELEKVLGAPPKKVFIEMTRSDGVKGDRGRTISRKKQFEDLYKKIKDESQDWASIIDNADASGKLRSKKMYLYLTQMGKCMYTGKPIDLDDLFDDNKYDIDHIYPRHYVKDDNLGNNLVLVEKKANASKGDRYPLDTDIRGKMHGTWKFLKEKGLITEEKYRRLTGSNPFSEEQQADFIARQLVQTSQGTKGVADLLKQLLPDAKIAYSKASNVSDFRRDYDLPKSRLINDFHHANDAYLNIVVGNAYLVKFTQNPLNYIRSGDVQYNLGRMFEKDIVRNGEVAWLADDGKGNHGTIVTVKKVMARNTPMMTRMVLNGHGAIANATLYPASKASADNYIPLKGSDSKIADVTKYGGFTSVSTSRFVLVEHLVKKERIRTLEALPILVANSCKTMEDIENYCEEELGLIAPKVKLDGIKIQSLLKINGFYVHLSGKTNKQLALRNAVNLCLDAKWKEYIHYLEKASNNGNYGNPICSDMNIELYSILAEKHSSSIFAKRPNPVGTKLVKEKETFSKLELVDQVSVLLQILQLSAIGITQADLRAIGGAGIAGKMLISKDISKQEEALLIMQSPTGLYESTIDLKTI

SEQ ID NO: 3367 - protein, 530 aa, Unknown
  Description of Unknown: uncultivated organism sequence
  Category: MG91 effectors
  Description: MG91-559 effector
MKNSSIIVSYEITLPQRIYPHLDRLFSVFGRNVRYFIDKLWNDDTLKLINQNGYAVSILKEIIQKPKDLPSRVFRNVLELSGQILRSQIERRRLFDKLIQKPCILIQSDREIAKFLNTSIPFALNVKRQVLKVLKKGEKRDYLSLIKPSFSNTVVITSADDNLKNGQFKKLKIDKNKLTLELKVPVGNNWEWIKVEKFLTNRLKKALKNAKEVKAPLIKKVDLKSGFSVYRLVIPIEIQTKVKDKVERIFALDLSSSEKRLGVGVIVDKEGHSKPVFFNAFKMVRKLERLYKEISSLERKIDHIADGLHSTVKKKHRERLYIRLRHLYQEQKLRWRKFKELRKQILETFTNLIIAHTKAYSCDAITIEDLKFQDLPEWKNRRFRRLFSTWFYSRFENRLRHKAQREGIKILTVNPFNTSQVCHRCGSKCKADRLEFKCESCGKHFDRDYNASVNIGMKALNLACKTKSKSYMDKDTPARFPSLQVLTRYKFKSLLTFLPLLKLIAYLRLVETSYLKLKNLFKYVNSDKYG

SEQ ID NO: 3368 - protein, 525 aa, Unknown
  Description of Unknown: uncultivated organism sequence
  Category: MG91 effectors
  Description: MG91-560 effector
MNEVFVLELPLQVEKYQADILNKRYEQLRQLYNYVQGKLLRQYRYFEQMKEYQACKTFKEKKDFFRSHPFHINGVFGSNKKLFNITFDEYGINGFVEKLGKKQVSTGVTYADLGITSTLLDRLSLAIWAAWDKMLYNYHAQRVSFKKRGELNIFGSRKKTNGSGKKMFSGMELHLDKMEVAIKLNGKVGKAAKFMTLPILPNPKHTDYEMWALKGGFDSVTVITIVRRLVRSQYKYYVQLTIEGEKPQKGRTLGKGRVGIDLGPTTVAISGENIVSIDKLAAKCDNIQEEITRLSRKIDRSRRANNPQNFNEDGTIKRGIKLVWNDSKRYKELRRELAELLRKQAAIRKQQHIDRANALLKEGDTFIVENNQISGWTTRAKETKVNEKTGKIQKKKRFGKSVANHAPSMFVSILENKVKSLGGEVVKVDTKNAASQYDFTDGSFTKHELKERNVTLSNGNTHQRDMLAAFNLQHLKYNEPEAKQYDTEAMAADYERFCQLEQEEIQRYKNKEKKDDRGTIGAEKL

SEQ ID NO: 3369 - protein, 632 aa, Unknown
  Description of Unknown: uncultivated organism sequence
  Category: MG91 effectors
  Description: MG91-561 effector
MTSQSFVIELPIAVDDAEMRTIVRKLEFARQLHNATLGTAIGQLQQMRQDTAWKQACAMPKGKERTAAFRALDRKYGLTEYDLHSVIARHREGSGRKAELGINETQKIATRVFQAINRYKLGLGGMPRFKSSKRGLHSIEGKTNKTGLKFRQEKKVLNWCGHDYRVLIDPKDNYVQRALKENERSDQYRKIKYCRLVRKRIRSADRFFLQVVIEGTAPVKHVYAPVTERAAIDPGPQSITLFSKAFAGKIQVAGSNNFNEAVSRRLLRAMDRSLRRNNPDAYNEDGTINKGAKLAKSKNYQRKVDQLHEMHRVAAAQRKCRHGQTINLLLSIAGDIRIEKNSWKAFQRGHFGKSLGKSAMSGFIAQLKSKAASAGLKVTEVNPYKLKLSQYDPYTDTYRKKDLSERWQEMKAGSGQYIQRDVLSALLLYCADIEKEIHIPKVAVEQLEGAKQFLTDAGYVVLKSTSSRDQRDPRLASEPKAMTPEMARQKILRGAGDSHLPTDQELGQIRAGGKVSTWSKETFPLQRGVVQKFDDRSEGLDMQTVYLSAGYTMGPHYFAGSIGWLNAELNGSAEGYPQDDGAAFLGALVYYYSLSKRTQLYAFTSFVDGKQLLDAGTDFNQTTGGFGLMHKF

SEQ ID NO: 3370 - protein, 413 aa, Unknown
  Description of Unknown: uncultivated organism sequence
  Category: MG91 effectors
  Description: MG91-562 effector
MKENGFSQYGLDAFFKADTKGALYQCGLNSMFLQYLSQCAWSAWDKKLFGKGDFVKTDKVVNIFCSRNKKERFCGFDYDLSTFTISIQSTCTKKIICTIPFVVNKKSDYELFALSQRICRIGIVRKLIRGKYKYYVQFTFDGVPYHKGRNIGTGIVGIDPGPSKIAIVGDNKVEIAKLAPNIEEDERKTARLKRKLDRSRRATNPHMYKEDGTIIKGQRQTCFSKVYNETRKQLADAQRKLAAKRKIAHNELANTLLEYGDTFKVEANSYKSMQARAKATSMTKSGRIRSKKRYGKSINNRAPSEFLVILKNKLLYYPKGKYYDVPSSYACTQFDFTNESFTEHKISERRIVTSDGIQHNRDTLAAFNIKNAIVNDTSTKKKKVTKSKEFFDIVRMKASYNEFCLMERYLLSV

SEQ ID NO: 3371 - protein, 534 aa, Unknown
  Description of Unknown: uncultivated organism sequence
  Category: MG91 effectors
  Description: MG91-563 effector
MRTNSLILSYELTLPQRIYPKLDRLFSVFKWKVRDLISDLWNEKGFKLLKEKGSAWGILKNVIERPLNLPSRVHRNILELSGQIIRSHLERKRIFDYIIEKPYRVLCDEKDIAKDLNTSSLFVLNVQNQIKNLLQKEKEKKDYFSVIEPSFSGNVIITSADDNLEKGQFRRLKIQRNKITFEIKVPTFEGWEWIRVVKFIPDKLRKVLSRAKDIKAPLIKRVFLKSGFTIYRLVIPVEIEVKVEERIERVFAIDLSPSEKRLGVGVVVSESGYSKPVFFSAYKKIKKLERLYREISNLERKIDNIGDQIHGTLKREHRERLYQRLEHLFEEQKLRWRKFKELREQILEIFVNFVIEHAKGYCCDAIVIEKLEFKGLPAWNNKRFRRLFSLWFYSEFSKRLEHKALRNGLRVIKVDFHRNSKICHICGSEGRVNKLEFYCPKCQRRFDRDYNGAVNIGMKALMVCRTKPKPYMGKGIPVRVPFPQVPTHSILPFKFKALLFTISFLRLLSYLRVVETSYLKFGRLTGLVGSDKYG

SEQ ID NO: 3372 - protein, 534 aa, Unknown
  Description of Unknown: uncultivated organism sequence
  Category: MG91 effectors
  Description: MG91-564 effector
METNSLILSYELTLPQRIYPKLDRLFSVFKWKIRDLISELWNEEGFKLLKEKKSACSILKSIIERPPGIPSRVYRNILELSGQIIRSHLERKRIFDYIIEKPCRVLCDEKDIAKDLNTSSLFVLNVQNQIKNLLQKEKEKKDYFSVIEPSFSGNVIITSADDNLEKGQFRRLKIEGNKITFEIKVPASEGWEWIKVKKFIPDKLRKVLSRAKDIKAPLIKRVFLKSGFTIYRLVVPVEIEVKVEKRIERVFAIDLSPSEKRLGVGVVVFESGYSKPVFFSAYKKVRKLERIYKEISNLERKIDNIANQIHSTFKKKHKAQLYQRLKHLYQEQKLRWRKFKELREQILEIFVNFVIEHARGYGCDAIVVEKLEFKNLPTWNNKRFRRLFSLWFYSRFSKRLEHKALRNGLRVIKVDSCGNSKICHICGFEGRINKLEFYCPKCQKRFDRDYNGAVNIGIKALRVCRTKPKPYKGKGIPVRVPFPQVPTHSILPFKFKALLFTISFLKLLSYLRVVETSYLKFGRLTGLVGSDKYG

SEQ ID NO: 3373 - protein, 1371 aa, Unknown
  Description of Unknown: uncultivated organism sequence
  Category: MG91 effectors
  Description: MG91-565 effector
MSQLENNVTKSGYYLGLDMGTDSVGWAVTDDKYNILRAKGKDLWGMREFEEAQTAADRRSHRTSRRRYQREVVRIGLLKDYFHDAIAKVDPLFYQRLENSAYFLEDKDECVRNKNGIFNDKNYTDRDYYRKYPTIFHLRMELINNPEPHDVRLIYLALLQMFKHRGHFLNASLGNEGNEKEFSDLLREMGNTLADITGTSLADNVVAKDVELVLSKRELSRTGKSERLAELFSITKKDKVQFECIKGICGLSIDARKIFEPLENEDKKIEICFSSSGYDEKITDIQGAVGDENYALIEIMKSVYDAGMLAGIMKGKHYLSEARIEDFEKHKKDLSVLKKVIKKYKTDEYDSLFRSEANGSYSAYVDSFNSGVKQRRDMKERKKEDFYKTVKTLIKDMPSDDKDIKYINNEIECDNFMPKQMTSSNGVIPNQVHLFEMKKILGNAESFISFLKEKDESGYSVAERIIKLFAFQIPYYVGPVSEDSGRNGGNGWVVRKEKGKVLPWNIDEKIDMRKTSEQFISRLVRKCTYISGENVLPKESLEYQKYALLNEINVISVDGERISTELKQKMYKELFMSGKSVTRKKIVSYLHNEGILSDETQLSGIDEKVNSNLSSYSKFKSVFGDKIDQDRYQEIAEQIIFWCTVYGDDKKYLSEQLEEKYKDELTDDQIKRITGFKFKDWGKMSKAFLELPGCDKEDGEVVPLVRMMWNTNHNMMELINSEEYTYKDELFAKQRRAINCISELKLEDLDEMYFSAPVKRMVWQTLQIITELEKVMGTAPTKVFVEMTRKHDDNKKRTQTRKDKFLDLYRSVKNDEHNWSQIINTADSDGTIRSKKMYLYLTQKGRCMYTGRPIDLDRLFDDNLYDIDHIYPRHYVKDDNIDNNMVLVEKEKNAHKSDIYPVESSIFSNCVNMWKELYNGKFISEEKFKRLTGREPFNDEQKAGFIARQLVETSQGTKGVSDIIKEALPDETRIIYSKASNVSEFRQEFTIPKSRLINDFHHAHDAYLNIVVGNVYETKFTQNPMNFIKTDYRKDQERNKYNLSRMFDWNVSRGLYTAWTASINSKKNRIDHNIENESGTICTVRKMLKKTTPILTRLSYVGQGGLANATVYSAKKASAGKGYLPLKTEGRLSDVSKYGGVTNASVEYFFLVEYEEKGKKICSLETVPVYMAGKVGKDKVKLEEYCRDILHLSNPSVRVPQIKLASLVKVDGYLLHITGKTGNQICLRNAVNLCEDVETVRYLKKLENSENKGYLEEEITEDENIKLYQNFMDKHINSIFRLRPNPVGDKLLEGFDRFKSLSVEEQTKVLLQMLNLTGIVAGCAADLTAIGESKATGKMLIPQKIIKFKEIKLINQSVTGLYDKSIDLLTV

SEQ ID NO: 3374 - protein, 510 aa, Unknown
  Description of Unknown: uncultivated organism sequence
  Category: MG91 effectors
  Description: MG91-566 effector
MRKKTTDENFIMELPLTVEKFQSDELDKRFELMRRIYNSAQNKLKRQYEYLSSFKAYKECKTKKEKGDFLKSHSFSFKGVLDKGGEPLKITFSEYDLKSYLSKFAKIKVDSQYTYSDYGINTSMLMHMAMAIWSAWKKVLYDPKAQEVSFKKHGELQSIGVDWEPKHPAGLILDLQKGELKVNLNNRQGHYARYITMKIKFGRKERQAWYEGDALNAGEDSIRGLTIVRRKIRGKYNYFLQMTIRNNKPQKGRTLGTGRVAIDLGTCKVAVVTKDSVRLIPLAPNISSYSEELRIIQRQMDRSRRANNPQKYHEDGTIKKGNHDKWVSSKEYIRLRDIKAELERKQAAVRKQDHIALANYLLSLGNEFVIENNDVQEWAKRKKEEKRREKDGKILSKAGLGKQIGNHSPAMFVTILKNKVESLGGSFIKVDTDNGATDYDFTNDEFTHHELEERYITLSDGKRHQRDTLAAFNLYHIDTTQNRVYDRLAMQRHYAWFCEREAEAVERFKR

SEQ ID NO: 3375 - protein, 530 aa, Unknown
  Description of Unknown: uncultivated organism sequence
  Category: MG91 effectors
  Description: MG91-567 effector
MTSQSFVIELPIAVDDAEMRTIVRKLEFARQLHNATLGTAMGQLQQMRQDAAWKEACVMPKGKERAAAFRALDRKYGLTEYDLHSVIARHREGSGRKAELGINETQKIATRVFQAINRFKLGLGGMPRFKSSKRGLHSIEGKTNKTGLKFRPEKKVLNWCGHDYRVLIDPKDDYIQRALKENERSDQYRKIKYCRLVRKRIRSSDRFFLQVVLEGTAPVKHVYAPVTERAAIDPGPQSIALFSKAFAGKIQVAGSNNFNEAASRRLLRAMDRSLRRNNPDAYNENGTIKKGAKLVKSKNYQRKVDRLREMHRVAAAERKCRHGQTINLLLSIAGDIRIEKNSWKAFQKGHFGKSLGKSAMSGFIAQLKSKAASAGLKVTEVNPYKLKLSQYDPYTDTYRKKDLSERWQEMKAGSGQYIQRDVLSALLLYCANIEKEIHIPKVAVEQLEGAKQFLTDAGYVVLKSTSSRDQRDPRLASEPKAMTPEMARQKILRGAGDSHLPTDQELGRIRAGGKVSTWSKETFPLQRGVV

SEQ ID NO: 3376 - protein, 618 aa, Unknown
  Description of Unknown: uncultivated organism sequence
  Category: MG91 effectors
  Description: MG91-568 effector
MAKENFVLTLPLKVEKWQADILDKRYELLRQIYNMVQQKLLRQYIYFSQQKAYRVCESFQQKREFFASHPFHIKGINTKNGEPFDIKFPYTYESRSSGTGKRPSNGISDYVSKLWSHSVGQNTTLSNLGINSYILEELGLHIMGAWEKRLYDPKSSHVSFKKYGDVNSFGSRYKKDKKSNRITLPGFTINIKEGYITYNANGRQGQFADLIRLSIDFSREKKGYATEALKGGLDSVRKLIIVRRCIRGKNKYYLQLTIEGDKPQKGRVLGKGNVGIDIGPSTIATSSLLGVHFDKLADKCDNIEHELYLVGRKMDRSRRANNPQNYNEDGTIKRGVRLVWKKDKDCKRYANLKQVRKELYRKQAEIRKHQHLEMANALLSQGDTFIVENNPIDAWVRRAKETTKTKTGKNRCKKRYGKSVANHAPAMLVSILKNKVQSLGGQFYEVDVRYAATQFDFTNGVKTKHDVSERSITLSNGRTLQRDMLSAFNLQHINQESIGTNDYAYNIEQMQADYPIFCRLESAERNRFKVARHNERDAQYFVGESKKILRLQPQKDTAANRHNGGVDRKHCNTCLGSKTKENAEITGSGLVRESIERVSQVPDEYHPVDTNSIILDGL

SEQ ID NO: 3377 - protein, 555 aa, Unknown
  Description of Unknown: uncultivated organism sequence
  Category: MG91 effectors
  Description: MG91-569 effector
MAGGIRATTRLMLYHRNMTTQTFILELPIKADDSQSRTISKKFEYGRMLYNATLGSGLGRLTQMRQDPEWRCACEMSKGKERNELFRRLNRQYRLTEYDFHSDIARHREGTKRKSELGICEAQKLATQAFNAVSRYMFKQGGRPRFKSFKRGLHSLEGKTNTTGLKFKPEKMLLDWCRKTYQVMLDPEDTYALEALYADKERTKFKRIKYNRIVCRNIKGVKRFYLQVVLEGTPPVKHAYAPASERMAIDPGPKAFAVFCPRVQAKVQIAPQAKVNEKAIRRIQRSMDRSLRAKNPNAFDEKGRIKPGVSLAYSKGYQARLTKLREAHRKVAGTRKCEHGELANLLLECAGNIRIEKNSWEAFKRSHFGRSINNSAASGFIQKLKSKAERAGLTVEEVSPYRLKPSQYDPYKDEFVKKALGERWMYLGDESTVIQRDIMSAILIYFADLKNQTHNPEVVKTNLEGLKRGLTDAGYVKHLKLPRSSGSKDPLFAPEPKALTTEELRSKCFRVDSDRHSSTINGTDGKAVGWSETFPLTGELFRDSVLSSVSARGAS

SEQ ID NO: 3378 - protein, 530 aa, Unknown
  Description of Unknown: uncultivated organism sequence
  Category: MG91 effectors
  Description: MG91-570 effector
MTFQSFVIELPIAVDDAEMRTIVRKLEFARQLHNATLGTAMGQLQQMRQDTAWKQACAMPKGKERTAAFRALDRKYGLTEYDLHSVIARHREGSGRKAELGINETQKIATRVFQAINRYKLGLGGMPRFKSSKRGLHSIEGKTNKTGLKFRPEKKVLNWCGHDYRVLIDPKDDYIQRALKENERSDKYRKIKYCRLVRKRIRSSDRFFLQVVLEGTAPVKHVYAPVTERAAIDPGPQSIALFSKEFAGKIQVAGSNNFNEAVSRRLLRAMDRSLRRNNPDAYNEDGTIKKGAKLVKSKNYQRKVDRLREMHRVAAAERKCRHGQTINLLLSIAGDIRIEKNSWKAFQRGHFGKSLGKSAMSGFIAQLKSKAASAGLKVTEVNPYKLKLSQYDPYTDTYRKKDLSERWQEMKAGSGQYIQRDLLSALLLYCANIEKEIHIPKVAVEQLEGAKQFLTDAGYVVLKSTSSRDQRDPRLASEPKAMTPEMARQKILRGAGDSHLPTDQELGRIRAGGKVSTWSKETFPLQRGVV

SEQ ID NO: 3379 - protein, 1365 aa, Unknown
  Description of Unknown: uncultivated organism sequence
  Category: MG91 effectors
  Description: MG91-571 effector
MKKDSMEYYLGLDMGTNSVGWAVTDTNYKLLRLKGKDAWGIREFDEAKTSEDRRVNRISRRRREREKVRIGLVKDYFSDAIHAVDPNFFMRLENSKYYLEDKDEDVKTPNAIFDDPDYTDKDYYDAYPTIFHLRKELIEDKKPHDVRLVYLAVLNMFKHRGHFLNSGLSTDSDNNIKIDGAWEDLNKTYEELYGEELAVVNCDELLSVLSDRDKSRSAKLEQLLEILQINKKTDKQKAELIRLICGLKSEAKKVFSDIETEEKVEICFTDIAYEEKLPDIAEAVGEENIALIQAAKTVSDIGVLAGILHGDDYLSFARVKTYEKHAEDLKRLKRVIRKYGDEAQYDSLFRSEEDGSYGAYVNSFNAGKKQRRSFKKRTMDEFYKTVKTVLSKLKGASDDPDYQIIEKDIENETFMPKQLTSANGIIPNQVHCRELKVILKNAEGYLPFLLEKDEGGRTVTDRICALFSFQIPYYIGPVSEQSEKNGGNGWVVRKEQGQVLPWNLEEKIDTAATSQRFIERMVRRCTYISDEMVLPKASLEYERFMVLNEINNLRIDGEKIPVSLKQEIYHELYEKGKRVTRKQLVSYLTNRGCIENEEQVSGIDITLHQYLSSYGKFYPIFGDDMKTDACKSMVEEIIRLATIFGDAKHLLRKQITEKYGDRISDPKILKRILGFKFKDWGNLSKRFLELEGCENGVGEIVPLIDMMWQTEFNMMELLNSPRFTYRQTLEEYQQKGLKPLTEWKAEDLNDYYFSAPVKRMVWQTLKIIKEIEMITGSAPKRVFVEMTRKPGEKDKRTDSRKKKFLELYKNIVDEDADWRKHWEGVISKADEDGSIRSKKMYLYLTQMGRCMYTGREIDLNDLFDDNLYDIDHIYARHYVKDDNIANNLVLVYKPENARKTDNYPIDSDIRSKMSGYWSLLHRRKLITDEKYRRLTGRNPFTDEQKADFIARQLVETSQATKGVTEIIKGVFPPEQTTIVYAKASNVSDFRHKYQIHKSRLVNDFHHAHDAYLNIVVGNVYYVKFTQNPLNFIKKEYAMDQEKHRYNLEKMFVWDVKRGDEIAWIGNGKDDKNTQGSLVTVKKMLAKQTPILSRMPITGHGGIANATLYSAKTAKDTGYMPLKTSDPKMQDVTKYGGYSTISRAYFFLVESGTEKKRIRTLETVPVYLVEKLQTKEVLEEYCRNQLKLINPSVRVSKIRLQSLINLNGYYVQMTGVTGKQVILRNAVSLVLNDDEMFYAKKIEKADNGSFEENVITKEKNVAFYDALARKHMETIYSLRPNPVGQKLEKARDLFVELSIEKQCAVLYQILNLSIIGPVKADLTLIGESKNTGVMLTSKNITKNKTFELINQSVTGLFEERVDLLTV

SEQ ID NO: 3380 - protein, 1352 aa, Unknown
  Description of Unknown: uncultivated organism sequence
  Category: MG91 effectors
  Description: MG91-572 effector
MLEKPYYLGLDMGTNSVGWAVTDQHYNLLKAKGKDLWGIREFIEADTSVERRTHRISRRRRQRERARIGLLNDYFHDAIIAIDPSFFQRLENSKYHLEDKDQNVRYKYNIFNGPDYTDVDYYAQYPTIYHLRKELLENPKPHDVRLVYLALLNMFKHRGHFLNAGISDGNNEHSLKDAYINFAISVSELTEDYFNQDVDYSAIEGILSSRDLNRTKKAEELSTVLGIDFKDKKYKEYLRAICGLKINAYTLFSDQLPNDTTKIDLCVSDASFDEKSEELVSLIGEDLFQIILNIKEIYDIGSLAGILKGYTYLSQARVAAYDKHKHDLKLLKTSIKKYCTKEEYNNFFNSDADGSYASYTGSFNSGNRERRVGSKRTSEDLYKEIKKLLKDASKNDPAINEIFTSIETESFLPKQLTASNGIIPNQVHSKEMAKILANAENYLPFLKDTDENNLSISNRILQLYKFQIPYYIGPVTEKSQRDGGNGWVIRKDNGRVLPWNIEEKIDVKATSEAFISRMVRRCTYMNGKQVLPKASLEYESFRVLNEINNLRIDGERISVALKQDIYTDLFQKGKKVTKKQLCNYLVTRGLIKSSEQVTGIDIAINNSLSTYGKFKAILGEDIKLDHIQHMIEDIVFWCTVYGDSKQFLKEQIEDKYNGKLSPEQIKRILGFKFKDWGNLSKEFFELKGADKSTGQAISIIRALWENNLNLMELINSPEFDFKERLADYEVNSLKTLSDFEPEDLNEYYFSAPVRRMIWQTTLIIKELVHVLGKEPDRIFIEMTREKDASRGRTLSRKKKFEDLYKNVKDENNDWAKVIEHADESGTIRSKKMYLYLTQKGRCMYTGNHIELSDLFNDNLYDIDHIYPRHFVKDDNIDNNLVLVTKEKNAHKSDNYPLEAEIFNKQRNMWTQLRKEGFISEEKYNRLMGRNAFTDEQKAGFIARQLVETSQGTKGVAELFHQLLPNSKIVYAKAGNVSDFRRNRELPKSRLVNDFHHAHDAYLNIVVGNVYYMKFTQNPINYIKNSYNKDMNKNNYNLSRMFDWDVKRGDEVAWIAQKKDSATGTISTVKKMLSKNTPLMTRLSYEGKGALANETLYSAEKAKGEGYIPFKSSDAKIQDVTKYGGFTSVTGAYFFLVEHDEKKKRIRTIESVPLYLADKIEKDSSELERYCDKLGLVNYDVRVRKIKIGSLIKYNGYFCYITGKTGYRLIVRNATNLCLASNWTKYIKKIEKYKETTIIDNVITAEENIKLYNELLNKFTVGIFGRRPNPIGEKMDSARDKFASLSTENQCLALYQILQLSAILGNESDLQLIGSSTHAGKMLISKKIGTDEIYLINQSPTGLFETKIDLQTI

SEQ ID NO: 3381 - protein, 1127 aa, Unknown
  Description of Unknown: uncultivated organism sequence
  Category: MG91 effectors
  Description: MG91-573 effector
MNMSKRILSLDLGITSIGYSILNEMDSNKYGLVDYGVSMFDKATDKDKKSKKLLHSASKSSSKLYDLRKERTRNLANLFEKYNLGSASELLNQEKQNRFINKWYLRAEKSFSERLTIEELFSIFYLVAKHRGYKSLDTDDLLEELLIELGFKVEEKKEKDAEKGKVKQALKTVESFRKKYPEKTVARIIYEIEIQKENPTFRNHDNYNYMIRREYINEEIRKIVQAQDEFGLFDAGIDIELFIKELIDTVDDQKDSTNDMSLFGNCEYFPEHKVTHQYSLLSDIFKMYQSVANITFGKTKISKEQIETIVNDFFKKIKLGKNIADIKYQDIRKVLKLNDEVKIFSKEDYHLDKKGKKIHSTITKFHFLSSLGKIGKSFIESIFEKENKFEILKEIFDVLEFEKAPKSMYNQINEIFIKYTLVEDEKLKNETIINLIKHKSGNSLNISAYTMIQFIPYFERGMTTDEIKQELKLERNEDYSTYKKGIKHLHVKTFEKDDNLEINNHPVKYAVSATMRLVKHLHVTYGVFDEIRVESTRELSQNEETKKAIEKANKENQAKFQKIIDNEEYQKIANHYNKNLKRYARKIMLWEEQEKLDMYSGEVISFNDIFSNKVDIDHIIPQSLGGLSVKHNLVLAHRDENHKKSNQLPMHFVVDTVDYVNRVEHLFKEYKINWKKKINLLAETLDDRYKDTFESKELRATSYIEALAAQMLKRYYPFPDKEKQANGQAVAHVQGRATSNIRKLLGVKTKVRDTNIHHAIDAILIGLTNKSWLQKLSNTFRENMGVIDDKARANIKKEIPLIEGIEPKELVELIEDAYNIYGEDSVFYKDIFGDTKVVNFWVSKKPMSSKIHKDTIYAKKPNGLFTVREGIIKQFIALKTTVTTDPEQFMKNFEKKILQKMYLFMTNPNDVICKIVISRAEEINLLLQSFVNIDRKNKEDMSEAKEKLDKLMHKELLDNNDNVIRKVKFYQSNLTGFDIRGGLATKEKTFIGFKATLENEKLVYERIDASNFKRIQKENDGSFKVYKNDIVFFVYPDGSFRGGKIVSFLADKGITAFLNSKFPSASELQPKSFCKMDKGKKSGAKQQSINKSIGIIKLNLDILGNIKSYSNFGEVSKEVELKIFHKE

SEQ ID NO: 3382 - protein, 533 aa, Unknown
  Description of Unknown: uncultivated organism sequence
  Category: MG91 effectors
  Description: MG91-574 effector
MSHSYILSFELTLPQRIYPYLDRLFNVFKWEVRRTVRKIWNEDFFEKLKGKGSASSILTKVLERPSNIPSRVYRNILELSGEIIRSHIERKRIYDYLIDKPCRVLFDEDEIADKLDTSSLFVLNVKRQVRKILKKEKEKKSYFETVKPYFKGKVIIFSADDSVENGQFKKLRFTEKYLELEIKVPDGNLWKWIKVKKFIPDRLKKFLPKAKRTCAPIIKKVYLKSGFYIYRLVIPFEFEVKFSEKNFRVFAIDLSPSEKRLGVGAIVTPEAHSRPLFFSAEKMIRKLERILKEISNLERKIDNIANEIHVTGNKEHKRRLEKRLKHLFVEQKLKWKKFTELRKQILEVFTKLILEHARAYNCSFIVVERLKFSKLPDWKHPRMKRFFSQWFYLRFVERLKQKALRYGIKVFLTNPCRTSRICHRCGKAGLLEKLEFLCECGIYDRDYNASVNIGKKALQILMSGAKSEPYMGEDTPGRFPFPRVPAHQVLPYHFRALLFLITLTRLISYLRIVETSSLKLKNLIRWTGSDRYG

SEQ ID NO: 3383 - protein, 994 aa, Unknown
  Description of Unknown: uncultivated organism sequence
  Category: MG91 effectors
  Description: MG91-575 effector
METLRKEYPEKTVARIIYEIEIQKPNPTFRNHDNYNYMIRREYIREEIEKIVLSQMDFGLFAKTFDVDTFIKELISTIDDQKDSTNDLSLFGNCEYYPEEKVAHQYSLLSDIFKMYQSVTNITFGKTKISKEQIKIISDDFFKKIKQSKNIADIKYQDIRKLLKLKDEVQIFGKEDYRLDKKGKKVHYTITKFHFLANLGKIDNSFMDAVFEKKNKYEILKEIFDVLEFEKAPKSMYTQINAVFMKYTLVEDERLKDETIINLIKYKTGSSLNISAHAMIKFIPYFEKGMTLDEIKKELNIKNFEDYSEFKKGIKYLGLGIDKKLFVTVEARDRIKKYPASQFEFDNQLIINNHPVKYVVSATMRLVKHLHVTYGAFDEIRVESTRELSQNEETKKAIDKANRENEAKFQKIIEDEEYQKIAKHYNKNLKRYARKIMLWEEQDKIDIYSGKVICFEDIFTNVVDIDHIIPESLGGLSVKHNLVLAHRDENVKKSNQLPMNFVTDKVAYVNRIEHLYKEYKINWKKKINLLAETLDDSYKDTFESKSLRSTSYIEALTAQMLKRYYPFPDKKKQVNGQAVAHVQGRATSNIRKLLGVKIKVRDTNIHHAIDAILIGLTSKSWLQKLSNTFRENMGVIDDEARAKINKELPLIEGVEPKELVELIEDAYNVYGEDSVFYKDIFGKTKAVNFWVSKKSDTSSLHKETIYGIDKIKGKIKDKQYTGLTTLRIDIIKRLKDAQKKPTLPKIGDDAHMFLNEYQEELIKKLYVYQYNQEDKILAIIQAKASDIAKCLEKYSDIKNENKDLFSKAKEELSCIIDKPLVDYNGNIIRKVKIIVSNKEKEPMIRGGTTVAERIAIGFSVYTLEKDKLLFRRIDLKDKLSKSLTKVNASSSMNIFRNDLIYIIFKKSEKNLVGYLESFDDKTNKIRLYDARFPKRLELQPKKYKVSSGKSRKEFGVGSAMGFIKINLDILGNIKSHTRFGEVSKEVEAQIFHKE

SEQ ID NO: 3384 - protein, 1358 aa, Unknown
  Description of Unknown: uncultivated organism sequence
  Category: MG91 effectors
  Description: MG91-576 effector
MQETGKDYYLGLDMGTNSVGWAVTDENYVLMRAKGKDLWGIREFDEALTAVDRRTHRVARRRRQRETARIGLLKEYFHDAIAEADPNFYQRLDNSKYHEEDKDSAVKGKNGIFNDANYTDKDYFKQYPTIFHLRTELIESTEKHDVRLVYLALLNMFKHRGHFLNAGLSTESENTMDTAYHNFVETAAQTIECNFMETVDIEKIKEILGSRDYSRSKKAELVAQLLHVDSKNKVQMACIKCICGLKVTAAAIFGDKMAADEEKKTDICFSDFGYDEKVPVILETVGEENFELVLAMQEIYDIGSLAGIMKDSLYLSMARVKEYEQHGKDLKILKGVVKKYATKEEYDTLFRTMEEGTYSAYVNSVNTKKKSRRDVKKRTRDEFYGRLKKIISTMPQDDSDVLYIKDKMEKEAFLPKQLTASNGVIPNQIHAREMKKILQNAETYLPFLKEKDTSGLTVSERILKLFSFQIPYYVGPVSEKSKLNGGNGWVVRKEEGTVLPWNIEEKIDMTATSREFVERMVRRCSYLSDERVLPKGSLLYERFCVLNEINAIKVDGVKIPVEIKQDLYSKYFKKGKKVTRKKIAEFLIARGVIKEDQTELISGIDIAVNSTLSTYAKFYAIFGEKMEQDSYKKMVEQIVEWCTIYGDAKKFLEQKIKECYGNILTQEEIKRITGFKFRDWGRLSKEFLELSGCSKATGEVMPLISMMWETNDNLMELLDDNYYTYREALEEKQNNAFRLLADIEPEDLDEMYFSAPVKRMVWQTLCIIKELEKVLGKAPKRLFVEMTRNEQKDKKRTDSRKQQFLDLYKNIKDESRDWKELITRADENGTLKSKKMYLYLTQRGRCMYTGHPIDLEDLFKDNRYDIDHIYPRHFVKDDNIMNNLVLVEKEKNAHKSDNYPLEEEIYKKQLPVWKDLHQCKLITDEKFKRLTGRNEFTDEQKAGFIARQLVETSQGTKGVTTILERALPDTKIVYAKASNVSEFRQKRDLLKSRVVNDFHHAQDAYLNIVVGNVYFVKFTQNPLHFIKAEYDKNKAQYEYNLSRMFDRDVRRGNETAWIGCKKGEEAGTIVTVKKMMAKNTPMLTRLSFEGKGGLADQTLYSAEKAKGNGYIPLKTSDAKMQDVTKYGGFNSVSTAYFFLVEHELKGKKVRTLETVPIIWRDRIEKDETMLLKYCTDVLELKNPSIRVKKIKLQSYIKKDGYYMYITGKTNKQITTKNAVELCVNQRWIDYIKIIEKTVEKKKECEEVNYNKNVEFYDLLLTKHTQEIFSNRPNPVGAKLKQGRDKFLSLTLFEQSTVLYEILQLSIIGNTRADLHSIGGAPISGVMLLSKKITDSKEFILINQSVTGLFEQKVDLLTV

SEQ ID NO: 3385 - protein, 497 aa, Unknown
  Description of Unknown: uncultivated organism sequence
  Category: MG91 effectors
  Description: MG91-577 effector
MTSPTFIIELPIRVSDSESRTILRKLEFARQLHNATLGTALGQLQQLRQDSEWEKACLMPKGKERSELFRKLDRKYQLTEYDLHTVIAKHRQRSGRKTELGINETQKIATRVFQAVNRYKLGLGGRPRFKSLSRGLRSIEGKSNKTGLKFNIEKSVLSWCKHDYRVFIDPQDDFLQRALRSEGRSGFKKVKYCRLVRKTIKGKNRFYLQVVLEGQAPIKHIYASTSERLSIDPGPQTIAVFSDVWAGKIKVSPTAQVDEKRLRCIQRSMDRSLRKSNPDCYESDGTLRKGCVLKKTKGYEKRIQRLQECHRRAAATRRCEHGQLINLLLSMAGDIRVEKNQWKAFQRGHFGKSLGKSGISGFIERLKSKAESAGLKVTEVKPYKLKLSQYDPYTDQYRKKSLNERWHSLGESSEWIQRDVMSALLLQCADLEEEKHIPTEVIKTLEGVKQLLRDAGYVILKPSSNGESNPTFASEPKAVTPEKVRLEIFCGASDSYL

SEQ ID NO: 3386 - protein, 497 aa, Unknown
  Description of Unknown: uncultivated organism sequence
  Category: MG91 effectors
  Description: MG91-578 effector
MTSPTFIIELPIRVSDSESRTILRKLEFARQLHNATLGTALGQLQQLRQDSEWEKACLMPKGKERSELFRKLDREYQLTEYDLHTVIAKHRQRSGRKTELGINETQKIATRVFQAVNRYKLGLGGRPRFKSLSRGLRSIEGKSNKTGLKFNIEKSVLSWCKHDYRVFIDPQDDFLQRALRSEGRSGFKKVKYCRLVRKTIKGKNRFYLQVVLEGQAPIKHIYASTSERLSIDPGPQTIAVFSDVWAGKIKVSPTAQVDEKRLRCIQRSMDRSLRKSNPDCYESDGTLRKGCVLKKTKGYEKRIQRLQECHRKAAATRQCEHGQLINLLLSMAGDIRVEKNQWKAFQRGHFGKSLGKSGISGFIERLKSKAESAGLKVTEVKPYKLKLSQYDPYTDQYRKKSLNERWHSLGESSEWIQRDVMSALLLQCADLEEEKHIPTEVIKTLEGVKQLLRDAGYVILKPSSNGESNPTFASEPKAVTPEKVRLEIFCGASDSYL

SEQ ID NO: 3387 - protein, 529 aa, Unknown
  Description of Unknown: uncultivated organism sequence
  Category: MG91 effectors
  Description: MG91-579 effector
MNTPSFVIELPIRTDDHERRTIVGKLEYARCLHNATLGTALGQLQQMRQDPAWKKACRMPKGKERTNAFRALDRQYGLTEYDLHAAIARHRQGSGRKEELGINETQKIATRIFQAVSRYKLGLGGRPRFKSQSRGLHSIEGKTNKTGLKFKPETSTLDWCGHEYRVLIDQRDGYLQRALREEADPKRWRKVKYCRLVRRRIRGKERFYLQVVLEGTAPLKRVYAPVVERLAIDPCPQTVAVFCPRFAGKIEVAPHAKVDEAELRVLQRSMDRSLRSCNPKAYNEDGTIKPGVELVKSKGYLKRVARLQELYRKAAATRKCDHGQLINLLLCLAGEIRIEKNSWAAFQRSHFGKSLGRSGVAGCLSQLKAKAESAGLKVIEAAPYKLKLSQYDPYTDSFRKKQLNERWHRAGMGDEYIQRDVLSAALLYCADLETQSHIPKAALALLEGAKQLLKDAGYWVSKPTSSQDPCDPRFAPEPKALTPEAVRLEIFGGTGDSPLQPSCPNGSKGAEGKVSACSKETFLLQQGVV

SEQ ID NO: 3388 - protein, 484 aa, Unknown
  Description of Unknown: uncultivated organism sequence
  Category: MG91 effectors
  Description: MG91-580 effector
MAHKENQKAFVVTFPLHTEKWQEDRIDKMMRMLTTFYNDRQRKLVRRYIYLSHSKAYKEAKGKGVVAFKNYMKENGFSQYGLDAFFKADTKGALYQCGLNSMFLQYLSQCAWSAWDKKLFGKGDFVKTDKVVNIFCSRNMKGRFCGFDYDLSTFTIRIKSTCTKKIICTIPFVVNKNSEYELYALSQKICRIGIVRKLIRSKYKYYVQFTFDGVPYNKGRNIGTGIVGIDPGPSKIAIVSDEKVEIAKLAPGIEEDERKTARLRRKLDRSRRATNPHMYKEDGTIIKGQRQTYFSKVYNETRKQLADAQRKLAAKRKIAHNELANTLLEYGDTFKVEANSYKSMQARTKATSMTKSGRIRSKKRYGKSINNRAPSEFLVILKNKLLYYPKGKYYDVPSSYACTQFDFTNESFTEHKISERRIVTSDGIQHNRDTLAAFNIKNAIVNDTSTKKKKITKSKEFFNIVKMKASYNEFCVKERYLLSV

SEQ ID NO: 3389 - protein, 530 aa, Unknown
  Description of Unknown: uncultivated organism sequence
  Category: MG91 effectors
  Description: MG91-581 effector
MTSQSFVIELPIAVDDAEMRTIVRKLEFARQLHNATLGTAMGQLQQMRQDAAWKEACVMPKGKERAAAFRALDRKYGLTEYDLHSVIARHREGSGRKAELGINETQKIATRVFQAINRYKLGLGGMPRFKSSKRGLHSIEGKTNKTGLKFRPEKKVLNWCGHDYRVLIDPKDDYIQRALKENERSDQYRKIKYCRLVRKRIRSSDRFFLQVVLEGTAPVKHVYAPVTERAAIDPGPQSIALFSKAFAGKIQVAGSNNFNEAASRRLLRAMDRSLRRNNPDAYNENGTIKKGAKLVKSKNYQRKVDRLREMHRVAAAERKCRHGQTINLLLSIAGDIRIEKNSWKAFQKGHFGKSLGKSAMSGFIAQLKSKAASAGLKVTEVNPYKLKLSQYDPYTDTYRKKDLSERWQEMKAGSGQYIQRDILSALLLYCADIEKEIHIPKVAVEQLEGAKQFLTDAGYVVLKSTSSRDQRDPRLAPEPKAMTPEMARQKILRGAGDSHLPTDQELGRIRAGGKVSTWSKETFPLQRGVV

SEQ ID NO: 3390 - protein, 530 aa, Unknown
  Description of Unknown: uncultivated organism sequence
  Category: MG91 effectors
  Description: MG91-582 effector
MTSQSFVIELPIAVDDAEMRTIVRKLEFARQLHNATLGTAMGQLQQMRQDAAWKEACVMPKGKERAAAFRALDRKYGLTEYDLHSVIARHREGSGRKAELGINETQKIATRVFQAINRFKLGLGGMPRFKSSKRGLHSIEGKTNKTGLKFRPEKKVLNWCGHDYRVLIDPKDDYIQRALKENERSDQYRKIKYCRLVRKRIRSSDRFFLQVVLEGTAPVKHVYAPVTERAAIDPGPQSIALFSKAFAGKIQVAGSNNFNEAASRRLLRAMDRSLRRNNPDAYNENGTIKKGAKLVKSKNYQRKVDRLREMHRVAAAERKCRHGQTINLLLSIAGDIRIEKNSWKAFQKGHFGKSLGKSAMSGFIAQLKSKAASAGLKVTEVNPYKLKLSQYDPYTDTYRKKDLSERWQEMKAGSGQYIQRDILSALLLYCADIEKEIHIPKVAVEQLEGAKQFLTDAGYVVLKSTSSRDQRDPRLAPEPKAMTPEMARQKILRGAGDSHLPTDQELGRIRAGGKVSTWSKETFPLQRGVV

SEQ ID NO: 3391 - protein, 529 aa, Unknown
  Description of Unknown: uncultivated organism sequence
  Category: MG91 effectors
  Description: MG91-583 effector
MSTPSFVIELPVRTDNGEQRTIERKLEYARCLHNATLNTALGQLRQMRQDPAWKEVCRMPKGKKRTDAFRALDRQYGLTEYDLHAVIARHREGSGRKAELGINETQKIATRIFQAVSRYKLGLGGCPRFKSFSRGLHSIEGKTNKTGLKFKPEEAVLDWCEHEYRVLIDQEDDYLQRALRDDSDPEKWRKVKYCRLVRRRLRGKVRFYLQVVLEGTAPLKHVCAPVTERLAIDPCPQALAVFCPRFAGKILVAAHAKLDETAIRVLQRSMDRSLRSCNPKAYNEDGTIRQGVELVKSKGYLKRVSRLRELHRKAAATRKCDHGQLINLLLSLGGEIRIEQNSWAAFQRSHFGKSLGKSAVAGCLSQLKAKAESAGLKVIEVAPYKLKLSQYDPYTDSFRKKQLNERWHRAGTGDEYIQRDVLSASLLYCADLETQSHIPKAALALLEGAKQLLKDAGYWVSKPTSSQDPCDPRFAPEPKALTPETVRLEIFGGTGDSPLQPSCPNGSKGVEGKVSACSKETFPLERGVV

SEQ ID NO: 3392 - protein, 500 aa, Unknown
  Description of Unknown: uncultivated organism sequence
  Category: MG91 effectors
  Description: MG91-584 effector
MTTPTFVLELPVKLGQGELAEVRKRFNYARNLYNATVGTALGQLQQMRQDPQWRQACSMPKGKERTTTFRRLDEKYRLREYDLHAIIAKHREASGRKHDLGINEAQKLATRVYEVVTKYKLGLGGKPRFKTQSRGLHSISGKTNKTGLRFKPEKSRLYWNSLEMFVEIDRKDRYIFEALHVDKDPSRFKRIKYCSLVRKVINGKERYYLQLSLEGQAPIKHIYAPQTERLAIDPAPKAITVFHKETVFKASIEVSVHAEKQKKLQKQMSRSLQLNNPDAFDENGTLKKGARLQVKSKSYLKKQTQLCEVHRRAAAARKNLHGQVSNLLLSLAGEIVLEKNSWKALQRGHFGKSLGKSGMGAFERTLISKAERAGCKVHLVAPYILKPSQYDPFKDAFEKIPLKQRWRRMDDKELIQRDMLSAVLLYCADLANERHNRTEIFQTLEGAKQLLSDGGFVVKENPTSNPALDPRFAPERKAQAIEEVRREILCGCKGQLNANR

SEQ ID NO: 3393 - protein, 529 aa, Unknown
  Description of Unknown: uncultivated organism sequence
  Category: MG91 effectors
  Description: MG91-585 effector
MSTPSFVIELPVRTDNGEQRTIERKLEYARCLHNATLNTALGQLQQMRQDPAWKEVCRMPKGKKRTDAFRALDRQYGLTEYDLHAVIARHREGSGRKAELGINETQKIATRIFQAVSRYKLGLGGRPRFKSQSRGLHSIEGKTNKTGLKFKPETSTLDWCGHEYRVLIDQQDGYLQSALREETDPKRWRKVKYCRLVRKRIRGKERFYLQVVLKGTAPLKRVYAPVVERLAIDPCPQTVAVFCPRFAGKIEVAAHAKVDEAELRVLQRSMDRSLRSCNPKAYNEDGTIKPGVELVKSKGYLKRLARLQELYRKAAATRKCDHGQLINLLLSLGGEIRIEQNSWAAFQRSHFGKSLGKSAVAGCLSQLKAKAESAGLKVIEAAPYKLKLSQYDPYTDSFRKKQLNERWHRAGTGDEYIQRDVLSASLLYCADLETQSHIPKAALALLEGAKQLLKDAGYWVSKPTSSQDPCDPRFAPEPKALTPETVRLEIFGGTGDSPLQPSCPNGSKGVEGKVSACSKETFPLERGVV

SEQ ID NO: 3394 - protein, 530 aa, Unknown
  Description of Unknown: uncultivated organism sequence
  Category: MG91 effectors
  Description: MG91-586 effector
MKNSSIIVSYEITLPQKIYPYLDRLFSVFGRNVRYFIDKLWNDDTLKLINQNGYAVSILKEIIQKPKDLPSRVFRNVLELSGQILRSQIERRRLFDKLIQKPCILIQSDREIAKFLNTSIPFALNVKRQVLKVLKKGEKRDYLSLIKPSFSNTVVITSADDNLKNGQFKKLKIDKNKLTLELKVPVGNNWEWIKVEKFLTDRLKKALKNAKEVKAPLIKKVDLKSGFSVYRLVIPIEIQTKVKDKVERIFALDLSSSEKRLGVGVIVDKEGHSKPVFFNAFKMVRKLERLYKEISSLERKIDHIADGLHSTVKKKHRERLYIRLRHLYQEQKLRWRKFKELRKQILETFTNLIIAHTKAYSCDAITIEDLKFQDLPEWKNRRFRRLFSTWFYSRFENRLRHKAQREGIKILTVNPFNTSQVCHRCGSKCKADRLEFKCESCGKHFDRDYNASVNIGMKALNLACKTKSKSYMDKDTPARFPSLQVLTRYKFKSLLTFLPLLKLIAYLRLVETSYLKLKNLFKYVNSDKYG

SEQ ID NO: 3395 - protein, 495 aa, Unknown
  Description of Unknown: uncultivated organism sequence
  Category: MG91 effectors
  Description: MG91-587 effector
MAREKEDSGCFVVTFPLKTEKWQEDRIDKILNLLTVRYREKQKTLLDRYIHLSHSPEFKEAKNAGLKAFRDFMNEHKFTKYDVEKVFSDSSQSKSATTDIMLTHGINSVIMQELSHRAWSAWEKKLYGQGKFIRLDNEVNSFKSRLQGSNIIGFEYSFTDMTLSMKATKPKKHTMFTIPFIVNRKSEYEAYALGCEVRNIAIVRQQIRGKNKYYVQFSFAGTPYNKGRKMGTGIVGIDPGPSKIAIVSDSEIRITTLAPSVKRDERAIRRMQRKLDRSRRATNPDNYNDDGTIKRGIKLKFDKSNSYKRTQAKLADMQRKLAAKRKIDHNILANEIITMGNEFHVENNSFKSMQARSKETKKNDKGKNLSKKRFGKSLANRAPYELLTILKNKVCQYADGEYVDIPSRVACTQFDFTNGEFTKHDPEERIITTSDGLVHDRDALAAFNMRFVNRQRIEGKKKLEKDKENFDLQAMTEAYKQFCALEENIKIGKRN

SEQ ID NO: 3396 - protein, 490 aa, Unknown
  Description of Unknown: uncultivated organism sequence
  Category: MG91 effectors
  Description: MG91-588 effector
MARENENSGCFVVTFPLKTEKWQEDRIDKILTLLTVRYREKQKILLDRYIHLSHSPEFKEAKKTGLKAFRDFMNEHNFTKYDVEKVFSDSSLSKSVTADIMLTHGINYSIMQELSHRAWSAWEKKLYVQGKFIKLDNEVNIFKSRLKGSTITGFEYSFTEMTLSMNATKPKKHTMFTIPFVVNRKSEYEAYAMDCEVRNIAIMRQQIRGKNKYYVQFSFAGTPYNKGRKIGTGIVGIDPGPSKIAIVSDSEIRITTLAPSVNRDERAICRMQRKLDRSRRATNPDNYNDDGTIKRGIKLTFEKSNSYKRTQTKLADTQRKLAAKRKIDHNILANEIIAMGNEFHVENNSFKSMQARSKETKKNDKGKNMSKKRFGKSLANRAPSELLTILKNKVNQYADGDYVDIPSGVACTQFDFTNGEFTKHELKDRTITTSDGVVHDRDALAAFNMRFVQKKKVEGKKKIEKAKENFDLQAMTEAYKHFCSLEKNIK

SEQ ID NO: 3397 - protein, 524 aa, Unknown
  Description of Unknown: uncultivated organism sequence
  Category: MG91 effectors
  Description: MG91-589 effector
MNEVFVLELPLQVEKYQADILNKRYEQLRQLYNYVQSKLLRQYRYFEQMKEYQVCKTIREKREFFRNHPFNINGVFDRSGRLLDITFDEYGIQGFVEKMIHKSVGENTTYADLGLNTLILDYLSASIWRAWDKKLYDLKAKRISFKKYGELDSFSSRRKVVNGTARFFGVELYLDKMELAVKVNGKVGKNAKFITLKMLHNPKHADYEMWALKGGVDSVKVVKVVRRLVRSQYKYYVQLTIEGEKPQKGRTLGKGNVGIDLGPTTVAVSGENVVSIDKLASNCDNIQEEITRLSRKIDRSRRANNPQNFNEDGTIKRGIKLVWNDSKRYKELRRELAELRRKQAAIRKQQHIDRANALLKEGDTFIVENNQISGWTTRAKETKVNEKTGKIQKKKRFGKSVANHAPSMFVSILENKVKSLGGEVVKVDTKNAASQYDFTDGSFTKHELKERNVTLSNGDTHQRDMLAAFNLQHLKLDETKTKQYDTETMAADYKRFCQLEQEEIQRYKNKEKKDDRGTVGAERL

SEQ ID NO: 3398 - protein, 1358 aa, Unknown
  Description of Unknown: uncultivated organism sequence
  Category: MG91 effectors
  Description: MG91-590 effector
MEKEYYLGLDMGTNSVGWAVTDDAYNLIRFKGKDMWGIREFDEANPAVERRTHRTSRRREQRNAVRMGLIRSYFADEIQKVDSNFYQRLDNSFFHVEDKQDNVKDKNGIFNDKNYKDADYYKQYPTIFHLRKELIEDASQKDVRLVYLAVANMFKHRGHFLLSGIGSESSKQTITDLYNQVSGLITEEYGISLKTDIAGTDFEQVLCSREYSRTRKSEKVCEILEIKNSDKLKKAFVKSMCGLSVKITDIIDDTFTEISDEDKKITFSFVDSDYDEKAGVLEEKLGTDVYDIISKLKEIHDKAQVAEIMKNYQYLSFARVADYEKHKKDLKILKRVVKKHFEPTVYDKLFRSEENGTYSAYVNSFNSEEKSRRNYKERKQEDLYNSIKKLLKSVDNVDDTDIEYIKNEMDKENFLPKQLTFKNGVIPNQIHASELKAILKNAEKYLPFLNEKDESGYTVSERILKLFSFQIPYYVGPVSSNSNGWGKRLESGQVLPWNIDKKIDLKETSEQFIQRMVRNCTYIAGEKVLPKASLLYENFKVLNEINNLSINDERITVNLKQDLYNTLFLKGKRVTRKQIFNYFHSRGLVEEDSQISGIDIAVNNSLSTYGKFLPLFGEHLKEDKYKKMVDDIVFWCTVYGDSRKFLREQLEEKYSDVLDENQIKRITGMKFKDWGNLSKEFLELSGCCKSTGEMIPLIRAMWETNYNLMELLHSEEFTYSEELEEKQGKIEKVLSEYTIDDLNEEYFSAPVKRMVWQTLLIIKEIEKIMKCPPTRIFVEMTRKDDEKGDNGRKSSRKDQLLALYKKIQSEDKEWKKEMSSRIEDYDKNGALRSKKLYLYFIQKGLDMYTGKPIDLDNLMSANSNYDIDHIYPRHFVKDDNINNNLVLASKPANAEKSDIYPIKDSIYQKMKYTWKVLRDEGLITEEKYKRLTGRNPFTDEQKAGFIARQLVETGQGTKGVADLLTALLPDTKLVYSKAGNVSDFRKRYDIPKSRLINDFHHAHDAYLNIVVGNIYFTKFTSNPLNYIRKECSSKDNKYQYNLGNMYKWDVKRDGKTAWIAAKEGETGTIATVKKILSRNTPTLTRLTIEGHGGIADATLYSHKKAKQDAYIPLKSSDARMADVTKYGGYSSVTTAYLFLVEHEIKGKKIRTLETVPLYLKDRLENSKEKLEEYCRETLGYTNPSVRMKKIKLQSLIKLNGYYMQISGRTGNRFTLRNYVQLCLNGKWVDYIHKLEKYQDKGFIDNVITDEKNVELYNVLCEKHSVGIFTLRPNPVGDKIKKGYDKFVNLTTEEQIKLLIEIIKLTCVGIVSANLTLIGGASISGKMLISKNITDAKECLLINQSVTGLYENRIDLLRV

SEQ ID NO: 3399 - protein, 524 aa, Unknown
  Description of Unknown: uncultivated organism sequence
  Category: MG91 effectors
  Description: MG91-591 effector
MNEVFVLELPLQVEKYQADILNKRYEQLRQLYNYVQGKLLRQYRYFEQMVDYQACKSIREKKDFLKNHPFHINGVLDKSGDQLDITFDEYGIQGFVEKLIHKSVGENTSYADLGFNTLILDYLSASIWRAWDKKLYDLKARRISFKKYGELDSFSSRRKVVRGMVYFSGMELHLDTMELAIKMNGKLGNNAKFITLKMLHNPKHAEYEMWALKGGVDSVKVLKVVRRLVRSQYKYYVQLTIEGEKPQKGRTLGKGNVGIDLGPTTVAVSGKNVVSIDKLASKCDNIQEEITRLSRKIDRSRRANNPQNFNEDGTIKRGIKLVWNDSKRYKELRRELAELRRKQAAIRKQQHIDRANALLKEGDTFIVENNQISSWTTRAKETKVNEKTGKIQKKKRFGKSVANHAPSMFVSILENKVKSLGGEVVKVDTKNAASQYDFTDGSFTKHELKERNVTLSNGDTHQRDMLAAFNLQHLKYDEKDTKQYDTEAMTADYERFCQLEQEEIQRYKNKEKKDDKGTIGAEKL

SEQ ID NO: 3400 - protein, 1136 aa, Unknown
  Description of Unknown: uncultivated organism sequence
  Category: MG91 effectors
  Description: MG91-592 effector
MSNKILSLDLGITSIGYSILEEMKNDRYSLLDYGISMFDKPTDKDGNSKKLLHSQSVSTTKLYDLRKERKQNLASLFEEFHLSTKALLLNQEKQNVYIQKWELRAKKAFEEKLEVGELFTIFYALAKHRGYKSLDSGDLLEELCVNLGIEREQSNNKKKDDDEKGKIKNALKTIENLRLDFPEKTVAQIIYETELQKENPTFRNHDNYNYMIRREYINDEIKKIIVFQKEFGFFSSNFDVEEFTSSIIATIDDQKDSTNDMSLFGFCEYYKDEEQKVAHQYSLLSDIYKMYESVSNINFNANPTIKITPEQIKLVADDFFTKVKKGKSIADIKYKDIRKILNLDDDFKIFNKDDSYSNKGKQQENRIIKFHFVNNLSKINNQFIVDIFEKENRYELLKEIFDVLAYEKAPHAIYEQLKDKIKDEKTIIDLIKYKSGNSLNISHYAMMKFIPYFEQGLNTDEIKEKLGLDRKEDYSSFKKGIKYLHINRFEEDDNLKINNHPVKYVVSATLRVIKHLHSIHGAFDEIRVESTRELSQNEQTKKDIEKANRVFEKELDAIVDDVEYQKIAEQYGKNLRKYARKILMYKEQEGRDIYSGEGIELKDIFTNIVDLDHIIPQSLGGLSVKHNFVLAHRDTNVQKSNQLPLNFVKEKQAFINRVEYLFEHHKINWKKKKNLLATTLEESFVDTFESKPLRATSYIEALTAQVLKRYYPFPNEKKESDGSAVRHIQGRATSNIRKLLGVKTKVRDTNIHHAIDAILIGFTNHSWLQKLSNTFRENMGVIDDEARSNIKKETPIIELIVNDEVEYLSPKELCEKIEESYNEFGEDSVFYRDVWGKVKVVNFWVSQKPMVSKIHKDTIYSKKRDSIFTVRENIINKFVLLKITSTTSSQKFMENFEKNILKKMYLFKTNPKDVICQIVQNRAKNIATLLDTFMEIDTENKEQISDAKGKLEQLMHKDLLDNNANIIRKIKFYQTNLTGFDVRGGLATKEKTFIGFRAWLEGENLQYERIDIANFDKIKKENDSSFKIYKNDVVFFVYADGSYRGGKIVSFLDYKGIASFSNSNYPALSEYQPKSFCKMGKDKHGNPKKSGAKQQTINASIGIIKLNLDITGNIRSYQVIGNVQSELLDFIKGIIK

SEQ ID NO: 3401 - protein, 507 aa, Unknown
  Description of Unknown: uncultivated organism sequence
  Category: MG91 effectors
  Description: MG91-593 effector
MKEQILSYELTLPQRIYPHLDRLFSVFKNQVNSYIPKLWNEKGFKLLSQKGSAVGILKKEFPTPEGIPSRVFRNVLELTGQIIRSQIERKEVFEKLLKGEEIKGYSKNFVLNIQRQIENLRKKGKEISCYFDLPHPKFNGQIVITSADDNLEKGQFRRLKISGNFLEFSIKVPTQKGWDWIKVKKLIPERLRRALTKAKEVKAVLIKKVLLKSGYHIYRLVIPLSFEVKEPENVERVLALDLSPSEKRLGTAVLVEGEKVSKPLFFKTQMLRKVERLHFEVSNLERKIDNIYNSIEKTACKREKERLWERLRHLFVEQKLRQRKIKQLRKEILETFTNLVIAHAKVYDCQAIVVEDLSFKEVPDWKDKKALRRFSQWFYSRFASRLEEKARLYNLKVIKVNPAHTSRICHKCGKEGKTERLVFKCSCGKYDRDYNASVNIAFRLTKPKAQRAEGIPGRFPSRLVQVEWKALLSFISFSKLLAWLRVVETSQLKLKKLLKRVYSDKYG

SEQ ID NO: 3402 - protein, 534 aa, Unknown
  Description of Unknown: uncultivated organism sequence
  Category: MG91 effectors
  Description: MG91-594 effector
METNSLILSYELTLPQRIYPKLDRLFSVFKWEVRDLISELWNEEGFKLLKEKNSACSILKSIIERPPGIPSRVYRNILELSGQIIRSHLERKRIFDYIIEKPCRVLCDEKDIAKDLNTSSLFVLNVQNQIKNFLQKEKEKKDYFSVIEPNFSGNVIITSADDNLEKGQFRRLKIEGNKITFEIKVPTFEGWEWIKVKKFIPDRLKKVLSRAKDIKAPLIKRVFLKSGFTIYRLVIPVEIEVKVEERIERVFAIDLSPSEKRLGVGVVVSESGYSKPVFFSAYKKIKKLERLYREISNLERKIDNIGDQIHGTLKREHRERLYQRLEHLFEEQKLRWRKFKELREQILEIFVNFVIEHARGYCCDAIVIEKLEFKGLPAWNNKRFRRLFSLWFYSRFSKRLEHKALRNGLRVIKVDSCGNSKICHICGSEGKVNKLEFYCLRCQRRFDRDYNGAVNIGIKALRVCRTKPKPYKGKGIPGRVPFPQVPTHQVLPFKFKVLLFTISFLKLLSYLRVVETSYLKFGRLTGLVGSDKYG

SEQ ID NO: 3403 - protein, 473 aa, Unknown
  Description of Unknown: uncultivated organism sequence
  Category: MG91 effectors
  Description: MG91-595 effector
MRQDPEWRRALGMVKGKERNELFRRLNRQYRLTEFDFHADIARHREGTKRKSELGINEAQKLATQAFNAVSRYMFKQGGRPRFKSFKRGLHSIEGKTNKTGLKFKPDQMILDWCRKTYQVMLDPKDAYALDALYADKERTQFKRIKYNRIVCRNIKGVKRFYLQVVLEGTPPVKHAYAPASERMAIDPGPKAFAVFCPRVQAKVQVAPRAKVNEKAIRRIQRSMDRSLRATNPNAFDEKGRIKPGVSLAYSKGYQVHLTNLREAHRKAAGTRKCEHGELANLLLECAGNIRIEKNSWEAFKRSHFGRSINNSAASGFIQRLKSKAERAGLTVEEISPFRLKPSQYDPYKDEFVKKALGERWMYLGDESTVIQRDIMSAILIYFADLKNQTHNPEVVKASLEGLKRGLTDAGYVKHLKLPRSSGSKDPLFAPEPKALTTEELRSKCFRVASNSHSSTLNGTDGKAVGWSETFWL

SEQ ID NO: 3404 - protein, 530 aa, Unknown
  Description of Unknown: uncultivated organism sequence
  Category: MG91 effectors
  Description: MG91-596 effector
MKTGSVIVSYELTLPQRIYPHLDRLFSVFGRSVRDFIDRFWNESTLELLSQKGHVCSIIKEIVQKPQNLPSRVFRNALELSGQILRSQIERKKLFDTFMQYPCLVLYDEKEIAKSLNTSIWFALNVKRQVLKLLRKGERGDYFSLVKPSFSNSVVITSADDSLERGQFKKLRIEKNKLLFELKVPIGNTWKWVKVTKFIPDRLRKALRNAKEIKAPLIKRVTLKSGFTIYRLVIPVEVELRVKNRVERVFALDLSPSEKRLGVGVVVDKEGHSKPVLFTAYKMVRKLERLYGEISGLERKIDNIADDLHSTFKKGHKERLNQRLRHLYQEQKLRWRKFKELRKQILETFINLVIAHAKAYSCDAIAIEDLKFKDLPDWENKRFRRLFSTWFYSRLEERLRHKAQREGIKVLSVNPFNTSQVCHECGSKGKANRFEFVCESCGKRFDRDYNASVNIGIKALTLACKTKSKPYMGEDIPARVSSLQVLTRYKFKALLTLLSFLKLLAYLRLVETSYLKLKSLLKCISADKYG

SEQ ID NO: 3405 - protein, 529 aa, Unknown
  Description of Unknown: uncultivated organism sequence
  Category: MG91 effectors
  Description: MG91-597 effector
MNTPSFVIELPIRTDDHERRTIVGKLEYARCLHNATLGTALGQLQQMRQDPAWKKACRMPKGKERTNAFRALDRQYGLTEYDLHAVIARHRQGSGRKEELGINETQKIATRIFQAVSRYKLGLGGRPRFKSQSRGLHSIEGKTNKTGLKFKPETSTLDWCGHEYRVLIDQRDGYLQRALREEADPKRWRKVKYCRLVRKRIRGKERFYLQVVLEGTAPLKRVYAPVVERLAIDPCPQTVAVFCPRFAGKIEVAPHAKVDEAELRVLQRSMDRSLRSCNPKAYNEDGTIKPGVELVKSKGYLKRVARLQELYRKAAAARKCDHGQLINLLLCLAGEIRIEKNSWAAFQRSHFGKSLGRSGVADCLSQLKAKAESAGLKVIEAAPYKLKLSQYDPYTDSFQKKQLNERWHRAGTGDEYIQRDVLSAALLYCADLETQSHIPKAALALLEGAKQLLKDAGYWVSKPTSSQDPCDPRFAPEPKALTPETVRLEIFGGTGDSHLQPSCPNGSKGAEGKVSACSKETFALERGVV

SEQ ID NO: 3406 - protein, 1359 aa, Unknown
  Description of Unknown: uncultivated organism sequence
  Category: MG91 effectors
  Description: MG91-598 effector
MQEKPYYLGLDMGTNSVGWAVTDQHYNLLKAKGKDLWGIREFIEADTSVERRTHRISRRRRQREQARIGLLNDYFHDAIIAIDPSFFQRLENSKYHLEDKDQNVRYKYNIFNDPDYTDADYYTQYPTIYHLRKELLENPKPHDVRLVYLALLNMFKHRGHFLNSGISDGNNERSLKDAYINFAISVSELTEDYFNQDVDYSTIEGILSSRDLNRTKKAEELSTVLGIDFKNKKYKEYLRAICGLKINAYTLFSDQLPDDTTKIDLCVSDASFDEKSEELVSLIGEDLFQIILNIKEIYDIGSLAGILKGYTYLSQARVAAYDKHKHDLKLLKSSIKKYCTKEEYNNFFNSDADGSYASYIGSFNSGNKERRVGSKRTSEDLYKEIKKLLKGANKSDPAINEFFTSIETESFLPKQLTASNGIIPNQVHSKEMARILTNAENYLPFLKETDENNLSISNRILQLYKFQIPYYIGPVTEKSQRDGGNGWVIRKDNGRVFPWNIEEKIDVKATSEAFISRMVRRCTYMNGNQVLPKASLEYESFRVLNEINNLRIDGERIPVTLKQDIYTDLFQKGKKVTKKQLCNYLATRGLIESSEQVTGIDIAINNSLSTYGKFKAILGEDIKLDHIQHMIEDIVFWCTVYGDSKQFLKEQIEDKYKGKLSPEQMKRILGFKFKDWGNLSKEFFELKGTDKSTGEAVSIIRALWENNLNLMELINSPEFDFKERLADYEANSLKTLSDFEPEDLNEYYFSAPVRRMIWQTTLIIKELVHVLGEEPARIFIEMTREKDASRGRTLSRKKKFEHLYKNVKDENTDWAKVIEHADESGTIRSKKMYLYLTQKGRCMYTGNHIELSDLFNDNLYDIDHIYPRHFVKDDNIDNNLVLVTKEKNAHKSDNYPLEAEIFNKQRNMWTQLRKEGFISEEKYNRLMGRNAFTDEQKAGFIARQLVETSQGTKGVAELFHQLLPNSKLVYAKAGNVSDFRNNRELPKSRLVNDFHHAHDAYLNIVVGNVYYVKFTQNPMNYIKNSYNKDMNKNNYNLSRMFDWDVKRGDEVAWVAQKQDGAAGTISTVKKMLSKNTPLMTRLSYEGKGALANETLYSAEKAKGEGYIPFKSSDAKIQDVTKYGGFTSVTGAYFFLVEHDQKKKRIRTIESVPLYLADKIDKDSSELERYCDKLGLVNYDIRVRKIKIGSLLNRNGYFAYLTGKTGKQLILRNATNLCLDKKWTRYIKKIEKYKETNVLDSIITSETMVNLYNELLNKFTVGIYGRRPNPIGEKMDSAKNTFTSYTLDNQCNLIYQILQLSKILGFETDLSLLRTNKQSGKPTREGGMQISKKIDNTTSMYLINQSPTGLFETKIDLQTI

SEQ ID NO: 3407 - protein, 524 aa, Unknown
  Description of Unknown: uncultivated organism sequence
  Category: MG91 effectors
  Description: MG91-599 effector
MNEVFVLELPLQVEKYQADILNKRYEQLRQLYNYVQGKLLRQYRYFEQMKEYQICKTFREKRDFFKSHPFQINEKLKGNKTPFKVSFDEYSLKGYIEKLVQKQVAPNMTYADFGFTTNILDHLGASIWAAWDKMLYDFKAKRISFKKYGELDSFSSRRKVVRGVVYFSGMELHLDTMELAIKMNAKVGKEAKFITLKMLHNPKHADYEMWALKGGVDSVKVVKVVRRLVRSQYKYHVQLTIEGEKPQKGRTLGKGNVGIDLGPTTVAVSGENVVSIDKLVSKCDNIQEEITRLSRKIDRSRRANNPQNFNEDGTIKRGIKLIWNDSKRYKELRRELAELRRKQAAIRKQQHIDRANALLKEGDRFIVENNQISGWTTRAKETKVNENTGKIQKKKRFGKSVANHAPSMFVSILENKVKSLGGEVVKVDTKNAASQYDFTDGSFTKHELRERHVTLSNGDTHQRDMLAAFNLQHLKYDEKDTKQYDTEAMAADYERFCQLEQEEILRYKNKEKKDDRGTIGAEKL

SEQ ID NO: 3408 - protein, 490 aa, Unknown
  Description of Unknown: uncultivated organism sequence
  Category: MG91 effectors
  Description: MG91-600 effector
MARENENSGCFVVTFPLKTEKWQEDRIDKILTLLTVRYREKQKILLDRYIHLSHSPEFKEAKKTGLKAFRDFMNEHNFTKYDVEKVFSDSSLSKSVTADIMLTHGINSSIMQELSHRAWSAWEKKLYGQGKFIKLDNEVNIFKSRLKGSTITGFEYSFTDMTLSMNATKPKKHTMFTIPFVVNRKSEYEAYALGCEVRNIAIMRQQIRGKNKYYVQFSFAGTPYNKGRKMGTGIVGIDPGPSKIAIVSDSEIRITTLAPSVNRDERAICRMQRKLDRSRRATNPDNYNDDGTIKRGIKLTFEKSNSYKRTQAKLADTQRKLAAKRKIDHNILANEIIAMGNEFHVENNSFKSMQARSKETKKNDKGKNMSKKRFGKSLANRAPSELLTILKNKVNQYADGDYVDIPSGVACTQFDFTNGEFTKHELKERTITTSDGVVHDRDALAAFNMRFVHKKKIEGKKKIEKDKENFDILAMTDAYRQFCSLEKNIK

SEQ ID NO: 3409 - protein, 504 aa, Unknown
  Description of Unknown: uncultivated organism sequence
  Category: MG91 effectors
  Description: MG91-601 effector
MFDAPSGADHLIKMRATAEWQTARAMPKSSERTKAFRDLRVRFRLSEYDFHADVAMHRKASGRGHLLGINECQKLASRAWISVERHLYNGGSPRFISSRRGLHSIEGKTNRTGIIWKADQQCVTVCKHVYRVRVDKRDDWLTRALQDPTDPTKPRKVKYCRIVREMRKGKERFLLQLVAEGTSPLKHAYAGKDLRMAIDPGLGSLTYATEDGTIAKVQIAPSADTDHRAIRRIQRAMERSRRATNPDNYEAVDVVRHGKKKKSFKVKSGRLQWRFSKRYESLRAELAEIFRLSAATRKREHGEVCNWLLGHAGHIIVEDNSYKAFQRGRFGKTIGRHAPAALYAQLASKAESAGLLVEVVSPKKLKPSQHNLLTDTFVKHELWERRVRLGNDDDDRWIDRDAAACLNLLYADLEKQTYAPERIREAVLAGVTAWLDAGVVVIQAREGITEREFGRFRRRGIPSLTVQGLRQQGFRGRSDSKSGATPRRKASTVSKPSHFSGEVV

SEQ ID NO: 3410 - protein, 529 aa, Unknown
  Description of Unknown: uncultivated organism sequence
  Category: MG91 effectors
  Description: MG91-602 effector
MNTPSFVIELPIRTDDHERRTIVGKLEYARCLHNATLGTALGQLQQMRQDPAWKKACRMPKGKERTNAFRTLDRQYGLTEYDLHAVIARHRQGSGRKEELGINETQKIATRIFQAVSRYKLGLGGRPRFKSQSRGLHSIEGKTNKTGLKFKPETSTLDWCGHEYRVLIDQRDGYLQRALREEADPKRWRKVKYCRLVRKRIRGKERFYLQVVLEGTAPLKRVYAPVVERLAIDPCPQTVAVFCPRFAGKIEVAPHAKVNEAELRVLQRSMDRSLRSCNPKAYNEDGTIKPGVELVKSKGYLKRVARLQELYRKAAATRKCDHGQLINLLLCLAGEIRIEKNSWAAFQRSHFGKSLGRSGVADCLSQLKAKAESAGLKVIEAAPYKLKLSQYDPYTDSFQKKQLNERWHRAGTGDEYIPRDVLSAALLYCADLETQSHIPKAALALLEGAKQLLKDAGYWITKPTSSQDSRDPRFAPEPKALTPETVRLEIFGGTGDSPLQPSCPNGSKGAEGKVSACSKETFPLQRGVV

SEQ ID NO: 3411 - protein, 525 aa, Unknown
  Description of Unknown: uncultivated organism sequence
  Category: MG91 effectors
  Description: MG91-603 effector
MEEVFVLELPLQVEKYQEDILNKRYEQLRQLYNYVQGKLLRQYRYFEQMKEYQTCKTFKEKRDFFRSHPFHINGVYGNNKELLDITFDEYGINGFVGKMGKKLVNADTTYADLGITSTLLDRLSLAIWAAWEKMLYDYHAKRISFKKYGELNIFGSRKKTNGSGKKMFSGMELHLETMTLSIKLNGKVGKNAKFITLPILHNPKHVDYEMMALKGGFDSVKVITVVRRMVRGRYKYYLQMSIEGEKPKKGRTLGKGNVGIDLGPTTIAVSSENIASIDKLASKCDNIEVEKKRLGRKIDRSRRANNPGNFNEDGTIKRGVRLTWNDSKRYKALRREMAELQRRQAAIRKQQHINRANALLKEGNTFIVENNQISGWTRKAKETKVNEKTGRIQKKKRFGKSVANHAPAMFVTILENKVKSLGGEVVKVDTQNAASQYDFTNNSFEKHELKERSVTLSNGDIHQRDMLAAFNLQHLKYDESEKKQYDREAMAQHYERFCELEQEEIMRYKSKEKKDDRSTIGAEKL

SEQ ID NO: 3412 - protein, 484 aa, Unknown
  Description of Unknown: uncultivated organism sequence
  Category: MG91 effectors
  Description: MG91-604 effector
MAHKENQKAFVVTFPLRTEKWQEDRIDKMMRMLTTFYNDRQRKLVRRYIYLSHSKAYKEAKGKGVVAFKNYMKEHGFSQYGLDAFFKADTKGALYQCGLNSMFLQYLSQCAWSAWDKKLFGKGDFVKTDKVVNIFCSRNMKGRFCGFDYDLRTFTIRIKSICTKEIICSIPFVVNKNSEYELYALSQKICRIGIVRKLIRSKYKYYVQFTFDGVPYNKGRNIGTGIVGIDPGPSKIAIVGDKKVEIAKLAPNIIEDERKTARLKRKLDRSRRATNPHMYKEDGTNIKGQRQICFSKSYNETRKQLADAQRKLAAKRKIAHNELANTLLEYGDTFKVEANSYKSMQARTKATSMTKSGRIRSKKRYGKSIKNRAPSEFLVILKNKLLYYPKGKYYDVPSSYACTQFDFTNESFTEHKISERRIVTSDGIQHNRDTLAAFNIKNAIVNDTSTKKKKVTKSKEFFDIVKMKASYNEFCVMEHYLLSE

SEQ ID NO: 3413 - protein, 530 aa, Unknown
  Description of Unknown: uncultivated organism sequence
  Category: MG91 effectors
  Description: MG91-605 effector
MTSQSFVIELPIAVDDAEMRTIVRKLEFARQLHNATLGTAMGQLQLMRQDAAWKEACVMPKGKERAAAFRALDRKYGLTEYDLHSVIARHREGTGRKAELGINETQKIATRVFQAINRYKLGLGGMPRFKSFKRGLHSIEGKTNKTGLKFKPEQKVLNWCGHDYRVLIDPKDDYIQRALKDNERSDQYRKIKYCRLVRRRIRSADRFFLQVVLEGTAPVKHVYAPVTERAAIDPGPQSIALFSKAFAGKIQVAGSNNFNEAASRRLLRAMDRSLRRNNPDAYNEDGTINKGVKLAKSKNYQRKVDRLHEMHRVAAAQRKCRHGQTINLLLSIAGDIRIEKNSWKAFQRGHFGKSLGKSAMSGFIAQLKSKAESAGLKVTEVNPYKLKLSQYDPYTDTYRKKDLSERWQEMKAGSGQYIQRDVLSALLLYCADIEKEIHIPKAAVEQLEGAKQLLTDAGYVVLKSTSSRDQRDPRLASEPKAMTPEMARQKILRGAGDSHLPTDQELGRIRAGGKVSTWSKETFPLQRGVV

SEQ ID NO: 3414 - protein, 405 aa, Unknown
  Description of Unknown: uncultivated organism sequence
  Category: MG91 effectors
  Description: MG91-606 effector
MPRFKSSKRGLHSIEGKTNKTGLKFRPEKKVLNWCGHDYRVLIDPKDDYIQRALKENERSDKYRKIKYCRLVRKRIRSSDRFFLQVVLEGTAPVKHVYAPVTERAAIDPGPQSIALFSKEFAGKIQVAGSNNFNEAVSRRLLRAMDRSLRRNNPDAYNEDGTIKKGAKLVKSKNYQRKVDRLREMHRVAAAERKCRHGQTINLLLSIAGDIRIEKNSWKAFQRGHFGKSLGKSAMSGFIAQLKSKAASAGLKVTEVNPYKLKLSQYDPYTDTYRKKDLSERWQEMKAGSGLYIQRDILSALLLYCADIEKEIHIPKVAVEQLEGTKQFLTDAGYVVLKSTSSRDQRDPRLASEPKAMTPEMARQKIFRGAGDSHLPTDQELGQIRAGGKVSTWSKETFPLQRGVV

SEQ ID NO: 3415 - protein, 529 aa, Unknown
  Description of Unknown: uncultivated organism sequence
  Category: MG91 effectors
  Description: MG91-607 effector
MNTPSFVIELPIRTDDHERRTIVGKLEYARCLHNATLGTALGQLQQMRQDPAWKKACRMPKGKERTNAFRALDRQYGLTEYDLHAVIARHRQGSGRKEELGINETQKIATRIFQAVSRYKLGLGGRPRFKSQSRGLHSIEGKTNKTGLKFKPETSTLDWCGHEYRVLIDQRDGYLQRALREEADPKRWRKVKYCRLVRKRIRGKERFYLQVVLEGTAPLKRVYAPVVERLAIDPCPQTVAVFCPRFAGKIEVAPHAKVNEAELRVLQRSMDRSLRSCNPKAYNEDGTIKPGVELVKSKGYLKRVARLQELYRKAAAARKCDHGQLINLLLCLAGEIRIEKNSWAAFQRSHFGKSLGRSGVADCLSQLKAKAESAGLKVIEAAPYKLKLSQYDPYTDSFRKKQLNERWHRAGTGDEYIQRDVLSASLLYCADLETQSHIPKAALALLEGAKQLLKDAGYWVSKPTSSQDPCDPRFAPEPKALTPETVRLEIFGGTGDSPLQPSCPNGSKGAEGKVSACSKETFPLQRGVV

SEQ ID NO: 3416 - protein, 525 aa, Unknown
  Description of Unknown: uncultivated organism sequence
  Category: MG91 effectors
  Description: MG91-608 effector
MEEVFVLELPLQVEKYQEDILNKRYEQLRQLYNYVQGKLLRQYRYFEQMKEYQTCKTFKEKRDFFRSHPFHINGVYGNNKELLDITFDEYGINGFVGKMGKKLVNADTTYADLGITSTLLDRLSLAIWAAWEKMLYDYHAKRISFKKYGELNIFGSRKKTNGSGKKMFSGMELHLETMTLSIKLNGKVGKNAKFITLPILHNPKHVDYEMMALKGGFDSVKVITVVRRMVRGRYKYYLQMSIEGEKPKKGRTLGKGNVGIDLGPTTIAVSSENIASIDKLASKCDNIEVEKKRLGRKIDRSRRANNPGNFNEDGTIKRGVRLTWNDSKRYKALRREMAELQRRQAAIRKQQHINRANALLKEGDTFIVENNQISGWTRKAKETKVNEKTGRIQKKKRFGKSVANHAPAMFVTILENKVKSLGGEVVKVDTQNAASQYDFTNNSFEKHELKERSVTLSNGDIHQRDMLAAFNLQHLKYDEAEKKQYDREAMAQHYERFCELEQEEIMRYKSKEKKDDRSTIGAEKL

SEQ ID NO: 3417 - protein, 544 aa, Unknown
  Description of Unknown: uncultivated organism sequence
  Category: MG91 effectors
  Description: MG91-609 effector
MNLDSRVMNVSPRIVIRQSKVKEVFVLELPLRVEKYQADLLNKRFEQLRQLYNYVQGKLLRQYRYFEQMKEYQACKTFKEKKDFFRKHPFHINGILGSNKKPLNITFDEYGIRGFVEKLVQKGVGASMTYADLGFTTSILDHLSSGIWSAWDKMLYDYKARRISFRKYGELDSFSSRRKVVQGKIYFSGMELHLDSMMLSVKMNGKIGKAAKFITLPILHNPKHANYEMWALRGGLDSVKVVKVVRRLIRGQYKYYFQMTIEGEKPQKGRTLGKGNVGIDLGPTTVAVSSENIVSIDKLASKCDSIEAEKAKLGRKIDRSRRANNPQNFNEDGTIKRGVRLVWNDSKRYKALRGEMAELQRRQSAIRKQQHIDRANELLKEGDIFIVENNQISGWTRKAKETRVDESTGRIRKKKRFGKSVANHAPSMFVNILENKVKSLGGQLVKVDTQNAASQYDFTDGSFTKHELQERNVTLSNGDTHQRDMLAAFNLQHLKYDEAEKKQYDREAMSKHYERFCELEQAEILRYKNKEKVDDRSTIGAKEL

SEQ ID NO: 3418 - protein, 530 aa, Unknown
  Description of Unknown: uncultivated organism sequence
  Category: MG91 effectors
  Description: MG91-610 effector
MTSQSFVIELPIAVDDAEMRTIVRKLEFARQLHNATLGTAMGQLQQMRQDAAWKEACVMPKGKERAAAFRALDRKYGLTEYDLHSVIARHREGSGRKAELGINEAQKIATRVFQAINRYKLGLGGMPRFKSSKRGLHSIEGKTNKTGLKFRPEKKVLNWCGHDYRVLIDPKDDYIQRALKENERSDKYRKIKYCRLVRKRIRSSDRFFLQVVLEGTAPVKHVYTPVTERAAIDPGPQSIALFSKAFAGKIQVAGPNNFNEAASRRLLRAMDRSLKRNNPDAYNEDGTIKKGAKLVKSKNYQRKVDRLREMHRVSAAERRCLHGQTINLLLSIAGDIRIEKNSWKAFQRGHFGKSLGKSAMSGFIAQLKSKAASAGLKVTEVNPYKLKLSQYDPYTDTYRKKDLRERWQEMKAGSGLYIQRDILSALLLYCADIEKEIHIPKVAVEQLEGAKQFLTDAGYVVLKSTSSRDQRDPRLASEPKAMTPEMARQKILRGAGDSHLPTDQALGRIRAGEKVSTWSKETFPLQRGVV

SEQ ID NO: 3419 - protein, 530 aa, Unknown
  Description of Unknown: uncultivated organism sequence
  Category: MG91 effectors
  Description: MG91-611 effector
MTSPSFVIELPIAVDDAEMRTIVRKLEFARQLHNATLGTALGQLQQMRQDTAWKQACAMPKGKERTAAFRALDRKYGLTEYDLHSVIARHREGTSRKAELGINETQKIATRVFQAINRYKLGLGGMPRFKSSKRGLHSIEGKTNKTGLKFRPEKKVLNWCGHDYRVLIDPKDDYIQRALKENERSDKYRKIKYCRLVRKRIRSADRFFLQVVLEGTAPVKHVYAPVTERAAIDPGPQSIALFSKAFAGKIQVAGSNNFNEAASRRLLRAMDRSLRRNNPDAYNEDGTIKKGAKLVKSKNYQRKVDRLREMHRVAAAERKCRHGQTINLLLSIAGDIRIEKNSWKAFQRGHFGKSLGKSAMSGFIAQLKSKAASAGLKVTEVNPYKLKLSQYDPYTDTYRKKDLSERWQEMKAGSGQYIQRDILSALLLYCADIEKEIHIPKVAVEQLEGAKQLLTDAGYVVLKSTSSRDQRDLRLAPEPKAMTPEMARQKILRGAGDSHLPTDQELGRIRAGGKVSTWSKETFPLQRGVV

SEQ ID NO: 3420 - protein, 1358 aa, Unknown
  Description of Unknown: uncultivated organism sequence
  Category: MG91 effectors
  Description: MG91-612 effector
MEKEYYLGLDMGTNSVGWAVTDDAYNLIRFKGKDMWGIREFDEANPAVERRTHRTSRRRKQRNAVRMGLIRSYFADEIQKVDSNFYQRLDNSFFHVEDKQDNVKDKNGIFNDKNYKDADYYKQYPTIFHLRKELIEDASQKDVRLVYLAVANMFKHRGHFLLSGIGSESSKQTITDLYNQVSGLITEEYGISLKTDIAGTDFEQVLCSREYSRTRKSEKVCEILEIKNSDKLKKAFVKSMCGLSVKITDIIDDTFTEISDEDKKITFSFVDSDYDEKAGVLEEKLGTDVYDIISKLKEIHDKAQVAEIMKNYQYLSFARVADYEKHKKDLKILKRVVKKYFEPTVYDKLFRSEENGTYSAYVNSFNSEEKSRRNYKERKQEDLYNSIKKLLKSVDNVDDTDIEYIKNEMDKENFLPKQLTFKNGVIPNQIHASELKAILKNAEKYLPFLNEKDESGYTVSERILMLFSFQIPYYVGPVSSNSNGWVKRLEPGQVLPWNIDKKIDLKETSEQFIQRMVRNCTYIAGEKVLPKASLLYENFKVLNEINNLSINGERITVNLKQDLYNTLFLKGKRVTRKQIFNYFHSRGLVEEDSQISGIDIAVNNSLSTYGKFLPLFGEHLKEDKYKKMVDDIVFWCTVYGDSRKFLREQLEEKYSDVLDENQIKRITGMKFKDWGNLSKEFLELSGCCKSTGEVMPLIRAMWETNYNLMELLHSEEFTYSEELEEKQGKIEKVLSEYTIDDLNEEYFSAPVKRMVWQTLLIIKEIEKIMKCPPTRIFVEMTRKDDEKGDNGRKSSRKDQLLALYKKIQSEDKEWKKEMSSRIEDYDKKGALRSKKLYLYFIQKGLDMYTGKPIDLDNLMSANSNYDIDHIYPRHFVKDDNINNNLVLASKPANAEKSDIYPIKDSIYQKMKYTWKVLRDEGLITEEKYKRLTGRNPFTDEQKAGFIARQLVETGQGTKGVADLLTALLPDTKLVYSKAGNVSDFRKKYDIPKSRLINDFHHAHDAYLNIVVGNIYFTKFTSNPLNYIRKECLSKDNKYQYNLGNMYKWDVKRDGKTAWIAAKEGETGTIATVKKMLSRNTPTLTRLTIEGHGGIADATLYSHKKAKQDAYIPLKSSDARMADVTKYGGYSSVTTAYLFLVEHEIKGKKIRTLETVPLYLKDRLENSKEKLEEYCRETLGYTNPSVRMKKIKLQSLIKLNGYYMQISGKTNKQFTVRNYVQFCLNSKWVDYIHKLEKYQDKGVIDDAITDEKNVELYNVLCEKHSVGIFTLRPNPVGDKIKKGYDKFVNLTTEEQIKLLIEIIKLTCVGIVSANLTLIGGASISGKMLISKNITDAKECLLINQSVTGLYENRIDLLRV

SEQ ID NO: 3421 - protein, 537 aa, Unknown
  Description of Unknown: uncultivated organism sequence
  Category: MG91 effectors
  Description: MG91-613 effector
MSTKSFTINLPIITGDQDRRRLQKSFSFGCNLQNAVMGGGWDCVLKMRATPEWQAARAMPKGSERTKAFRDLRVQFRLSEYDFHADVAMHRKASGRGHLLGINECQKLASRAWISVERHLYNGGSPRFISSRRGLHSIEGKTNRTGIIWKADQQCVTVCKRVYRVRVDKRDDWLTRALQDPTDPKKPRKVKYCRIVREMRKGKERFLLQLVAEGTSPLKHAYAGKDLRMAIDPGLGSLTYATEDGTIAKVQIAPSADTDHRAIRRIQRAMERSRRATNPDNYEAVDVVRHGKKKKSFKVKSGRLQWRFSKRYESLRAELAEIFRLSAATCKREHGEVCNWLLGHAGHIIVEDNSYKAFQRGRFGKTIGRHAPAALYAQLTNKAESAGLLVEVVSPKKLKPTQHNLLTGQFVKHELWERRVRLGNDDDDRWIDRDAAACLNLLYADLEKQTYAPERIREAVLAGVTAWLDAGVVVIQAREGITEREFGRFRRRGIPSLAVQGLRQQGFRGRSDSKSGVTPRRKASTVSKPSHFSGEVV

SEQ ID NO: 3422 - protein, 530 aa, Unknown
  Description of Unknown: uncultivated organism sequence
  Category: MG91 effectors
  Description: MG91-614 effector
MTSPSFVIELPIAVDDAEMRTIVRKLEFARQLHNATLGTALGQLQQMRQDTAWKQACAMPKGKERTAAFRALDRKYGLTEYDLHSVIARHREGTSRKAELGINETQKIATRVFQAINRYKLGLGGMPRFKSSKRGLHSIEGKTNKTGLKFRPEKKVLNWCGHDYRVLIDPKDDYIQRALKENERSDKYRKIKYCRLVRKRIRSADRFFLQVVLEGTAPVKHVYAPVTERAAIDPGPQSIALFSKAFAGKIQVAGSNNFNEAASRRLLRAMDRSLRRNNPDAYNEDGTIKKGAKLVKSKNYQRKVDRLREMHRVAAAERKCRHGQTINLLLSIAGDIRIEKNSWKAFQRGHFGKSLGKSAMSGFIAQLKSKAASAGLKVTEVNPYKLKLSQYDPYTDTYRKKDLSERWQEMKAGSGQYIQRDILSALLLYCADIEKEIHIPKVAVEQLEGAKQFLTDAGYVVLKSTSSRDQRDPRLASEPKAMTPEMARQKILRGAGDSHLPTDQALGRIRAGGKVSTWSKETFPLQRGVV

SEQ ID NO: 3423 - protein, 506 aa, Unknown
  Description of Unknown: uncultivated organism sequence
  Category: MG91 effectors
  Description: MG91-615 effector
MVVEVKFSPMTSPTFIIELPIRVSDSESRTILRKLEFARQLHNATLGTALGQLQQLRQDSEWEKACLMPKGKERSELFRKLDRKYQLTEYDLHTVIAKHRPRSGRKTELGINETQKIATRVFQAVNRYKLGLGGRPRFKSLSRGLRSIEGKSNKTGLKFNIEKSVLSWCKHDYRVFIDPQDDFLQRALRSEGRSGFKKVKYCRLVRKTIKGKNRFYLQVVLEGQAPIKHIYASTSERLSIDPGPQTIAVFSDVWAGKIKVSPTAQVDEKRLRCIQRSMDRSLRKSNPDCYESDGTLRKGCVLKKTKGYEKRIQRLQECHRKAAATRRCEHGQLINLLLSMAGDIRVEKNQWKAFQRGHFGKSLGKSGISGFIERLKSKAESAGLKVTEVKPYKLKLSQYDPYTDQYRKKSLNERWHSLGESSEWIQRDVMSALLLQCADLEEEKHIPTEVIKTLEGVKQLLRDAGYVILKPSSNGESNPTFASEPKAVTPEKVRLEIFCGASDSYL

SEQ ID NO: 3424 - protein, 524 aa, Unknown
  Description of Unknown: uncultivated organism sequence
  Category: MG91 effectors
  Description: MG91-616 effector
MNEVFVLELPLLVERYQADILNKRYEQLRQLYNYVQGKLLRQYRYFEQMKEYKACEKIKEKRDFFRAHPFHINGVLNGNKEQLDITFDKNGINGFVEKLAQKSAGPNITYADLGFTTYILDHLSASIWAAWEKKLYDFKAKRISFKKYGELDSFSSRRKVVGGKVYFSGMELHLDTMKLSIKMNGKQGDNAKFITLKMLHNTKHADYEMWALKGGVDSVKVVKVVRRLVRSQYKYYVQLTIEGEKPQKGRKLGKGNVGIDLGPTTVAVSGENVVSIDKLASKCDNIQEEITRLSRKIDRSRRANNPQNFNEDGTIKRGIKLIWNDSKRYKELRRELAELRRKQAAIRKQQHIERANALLKEGDTFIVENNQISGWTTRAKETKVNEKTGKIQKKKRFGKSVANHAPSMFVSILENKVKSLGGEVVKVDTKNAASQYDFTDNCFTKHELKERNVTLSNGDTHQRDMLAAFNLQHLKYDEAEAKQYDTEAMAANYERFCQLEQEEIQRYKNKEKKDDRSTIGAEKL

SEQ ID NO: 3425 - protein, 530 aa, Unknown
  Description of Unknown: uncultivated organism sequence
  Category: MG91 effectors
  Description: MG91-617 effector
MRTSSIIVSYELTLPQRIYPHLDRLFSVFGRSVRDFIDRFWNESTLELLSQKGHVCSILKEIVQKPQNLPSRVFRNALELSGQILRSQIERKKLFDTFMQYPCLVLYDEKEIAKSLNTSIWFALNVKRQVLKLLRKGERGDYFSLVKPSFSNSVVITSADDSLERGQFKKLRIEKNKLLFELKVPIGNTWKWVKVTKFIPDRLRKALRNAKEIKAPLIKRVTLKSDFTIYRLVIPVEVELRVKNRVERVFALDLSPSEKRLGVGVVVDKEGHSKPVLFTAYKMVRKLERLYGEISGLERKIDNIADDLHSTFKKGHKERLNQRLRHLYQEQKLRWRKFKELRKQILETFINLVIAHAKAYSCDAIAIEDLKFKDLPDWENKRFRRLFSTWFYSRLEERLRHKAQREGIKVLSVNPFNTSQVCHECGSKGKANRFEFVCESCGKRFDRDYNASVNIGIKALTLACKTKSKPYMGEDIPARVSSLQVLTRYKFKALLTLLSFLKLLAYLRLVETSYLKLKSLLKCISADKYG

SEQ ID NO: 3426 - protein, 525 aa, Unknown
  Description of Unknown: uncultivated organism sequence
  Category: MG91 effectors
  Description: MG91-618 effector
MEEVFVLELPLQVEKYQEDILNKRYEQLRQLYNYVQGKLLRQYRYFEQMKEYQTCKTFKEKRDFFRSHPFHINGVYGNNKELLDITFDEYGINGFVGKMGKKLVNADTTYADLGITSTLLDRLSLAIWAAWEKMLYDYHAKRISFKKYGELNIFGSRKKTNGSGKKMFSGMELHLETMTLSIKLNGKVGKNAKFITLPILHNPKHVDYEMMALKGGFDSVKVITVVRRMVRGRYKYYLQMSIEGEKPKKGRTLGKGNVGIDLGPTTIAVSSENIASIDKLASKCDNIEVEKKRLGRKIDRSRRANNPGNFNEDGTIKRGVRLTWNDSKRYKALRREMAELQRRQAAIRKQQHINRANALLKEGNTFIVENNQISGWTRKAKETKVNEKTGRIQKKKRFGKSVANHAPAMFVTILENKVKSLGGEVVKVDTQNAASQYDFTNNSFEKHELKERSVTLSNGDIHQRDMLAAFNLQHLKYDEAEKKQYDREAMAQHYERFCELEQEEIMRYKSKEKKDDRSTIGAEKL

SEQ ID NO: 3427 - protein, 529 aa, Unknown
  Description of Unknown: uncultivated organism sequence
  Category: MG91 effectors
  Description: MG91-619 effector
MKEVFVLELPLQVEKYQADILNKRYEQLRQLYNYVQGKLLRQYRYFEQMKDYQACKAFKEKREFFKTHPFHINGVLGRNKELLDITFNEYGILGWVTKLGQMSIGSGKTYADIGITARILANLSDNIWSAWNKKLYDYRSERISFKKYGSLNTFGSGKTILKKGKEIKEYFSGMVLHLERMEIDIKTNGSNGKNATFISLPILHNPKHADYEMMALSGGSSSIKVLTIVRRLVRGQYKYYLQLSIEGEKPQKGRTLGKGNVGIDLGPTTIAVSGENVVSIDKLASKCDNIQTEITKLARKIDRSRRANNPQNFNEDGTIKRGIKLVWNDSKRYKELRRELAELCRKQAAIRKQQHIDRANALLKEGDTFIVENNPVKAWAARAKETKVNEKTGKIQSKKRGGKSIGNHAPAMFVDILENKVKSLGGTFIRANTNNAASQYDFSNNSFKEGEDRHGLNERAITLSNGNTHQRDMLAAFNLQHLTDEKKQYDVEAMKRDYERFCQLEQEEIQRYKNKEKKDDRSTIGAEKL

SEQ ID NO: 3428 - protein, 537 aa, Unknown
  Description of Unknown: uncultivated organism sequence
  Category: MG91 effectors
  Description: MG91-620 effector
MSTKSFIISLPIITGDQDRRRLRKSFSFGCNLQNAVMGGGWDRVLKMRATAEWQTARAMPKNSERTKAFRDLRVRFRLSEYDFHADVAMHRKASGRGHLLGINECQKLASRAWISVERHLYNGGSPRFISSRRGLHSIEGKTNRTGIIWKADQQCVTVCKRVYRVRVDKRDDWLTRALQDPTDPTKPRKVKYCRIVREMRKGKERFLLQLVAEGTSPLKHAYAGKDLRMAIDPGLGSLTYATEDGTIAKVQIAPSADTDHRAIRRIQRAMERSRRATNPDNYEAVDVVRHGKKKKSFKVKSGRLQWRFSKRYESLRAELAEIFRLSAATRKREHGEVCNWLLGHAGHIIVEDNSYKAFQRGRFGKTIGRHAPAALYAQLTNKAESAGLLVEVVSPKKLKPTQHNLLTGQFVKHELWERRVRLGNDDDDRWIDRDAAACLNLLYADLEKQTYAPERIREAVLAGVTAWLDAGVVVIQAREGITEREFGRFRRRGIPSLTVQGLRQQGFRGRSDSKSGTTPRRKASTVSKPSHFSGEVV

SEQ ID NO: 3429 - protein, 525 aa, Unknown
  Description of Unknown: uncultivated organism sequence
  Category: MG91 effectors
  Description: MG91-621 effector
MEEVFVLELPLQVEKYQEDILNKRYEQLRQLYNYVQGKLLRQYRYFEQMKEYQTCKTFKEKRDFFRSHPFHINGVYGNNKELLDITFDEYGINGFVGKMGKKLVTADTTYADLGVTSTLLDRLSLAIWAAWEKMLYDYHAKRISFKKYGELNIFGSRKKTNGSGKKMFSGMELHLETMTLSIKLNGKVGKNAKFITLPILHNPKHVDYEMMALKGGFDSVKVITVVRRMVRGRYKYYLQMSIEGEKPKKGRTLGKGNVGIDLGPTTIAVSSENIASIDKLASKCDNIEVEKKRLGRKIDRSRRANNPGNFNEDGTIKRGVRLTWNDSKRYKALRREMTELQRRQAAIRKQQHINRANALLKEGDTFIVENNQISGWTRKAKETKVNEKTGRIQKKKRFGKSVANHAPAMFVTILENKVKSLGGEVVKVDTQNAASQYDFTNNSFEKHELKERSVTLSNGDIHQRDMLAAFNLQHLKYDESEKKQYDREAMAQHYERFCELEQEEIMRYKSKEKKDDRSTIGAEKL

SEQ ID NO: 3430 - protein, 524 aa, Unknown
  Description of Unknown: uncultivated organism sequence
  Category: MG91 effectors
  Description: MG91-622 effector
MYEVFVLELPLQVEKYQADILNKRYEQLRQLYNYVQGKLLRQYRYFEQMKEYQACKTIKEKRDFFKSHPFQVNESLCGDKSAFEISFNEFSIKGFIEKLVQKSVGANMTYADLGFTTNILDHLGASVWAAWDKKLYDFKAKRISFKKYGELDSFSSRRKVVGGKVYFSGMELHLDTMELAIKMNGKQGNNAKFITLKMQHNPKHAEYEMWALKGGVDSVKVVKVVRRLVRSQYKYYVQLTIEGEKPQKGRTLGMGNVGIDLGPTTVAVSGENVVSIDKLASKCDNIQEEITRLSRKIDRSRRANNPQNFNEDGTIKRGVKLIWNDSKRYKELRRELAELRRKQAAIRKQQHIDRANAILKEGDTFIVENNQISSWTTRAKETKVNEKTGKIQKKKRFGKSVANHAPSMFVSILENKVKSLGGEVVKVDTKNAASQYDFTDGSFTKHELKERNVTLSNGDTHQRDMLAAFNLQHLKYNEAEAKQYDTEAMAADYERFCQLEQEEIQRYKNKEKKDDKGTIGAEKL

SEQ ID NO: 3431 - protein, 530 aa, Unknown
  Description of Unknown: uncultivated organism sequence
  Category: MG91 effectors
  Description: MG91-623 effector
MPSQSFVIELPIAVDDAEMRTIVRKLEFARQLHNATLGTAMGQLQQMRQDAAWKEACVMPKGKERAAAFRALDHKYGLTEYDLHSVIARHREGSGRKAELGINETQKIATRVFQAINRYKLGLGGMPRFKSSKRGLHSIEGKTNKTGLKFRPEKKVLNWCGHDYRVLIDPKDDYIQRALKENERSDKYRKIKYCRLVRKRIRSSDRFFLQVVLEGTAPVKHVYAPVTERAAIDPGPQSIALFSKEFAGKIQVAGSNNFNEAASRRLLRAMDRSLRRNNPDAYNENGTIKKGAKLVKSKNYQRKVDRLREMHRVAAAERKCRHGQTINLLLSIAGDIRIEKNSWKAFQRGHFGKSLGKSAMSGFIAQLKSKAASAGLKVTEVNPYKLRLSQYDPYTDTYRKKDLSERWQEMKAGSGLYIQRDVLSALLLYCADIEKEIHIPKVAVEQLEGAKQFLTDAGYVVLKSTSSRDQRDPRLASEPKAMTPEMARQKILRGAGDSHLPTDQELGQIRAGGKVSTWSKETFPLQRGVV

SEQ ID NO: 3432 - protein, 525 aa, Unknown
  Description of Unknown: uncultivated organism sequence
  Category: MG91 effectors
  Description: MG91-624 effector
MEEVFVLELPLQVEKYQEDILNKRYEQLRQLYNYVQGKLLRQYRYFEQMKEYQTCKTFKEKRDFFRSHPFHINGVYGNNKELLDITFDEYGINGFVGKMGKKLVNADTTYADLGITSTLLDRLSLAIWAAWEKMLYDYHAKRISFKKYGELNIFGSRKKTNGSGKKMFSGMELHLETMTLSIKLNGKVGKNAKFITLPILHNPKHVDYEMMALKGGFDSVKVITVVRRMVRGRYKYYLQMSIEGEKPKKGRTLGKGNVGIDLGPTTIAVSSENIASIDKLVSKCDNIEVEKKRLGRKIDRSRRANNPENFNEDGTIKRGVRLTWNDSKRYKALRREMAELQRRQAAIRKQQHINRANALLKEGDTFIVENNQISGWTRKAKETKVNEKTGKIQKKKRFGKSVANHAPAMFVTILENKVKSLGGEVVKVDTQNAASQYDFTNNNFKKHELNERSVTLSNGDTHQRDMLAAFNLQHLKYDEAEKKQYDREAMSKHYERFCELEQAEIVRYKNKEKADDRSTIGAKEL

SEQ ID NO: 3433 - protein, 491 aa, Unknown
  Description of Unknown: uncultivated organism sequence
  Category: MG91 effectors
  Description: MG91-625 effector
MRATAEWQTARAMPKSSERTKAFRDLRVHFRLSEYDFHADVAKHRKASGRGHLLGINECQKLASRAWISVERHLYNGGSPRFISSRRGLHSIEGKTNRTGIIWKADQQCVTVCKRVYRVRVDKRDDWLTRALQDPTDPTKPRKVKYCRIVREMRKGKERFLLQLVAEGTSPLKHAYAGKDLRMAIDPGLGSLTYATEDGTIAKVQIAPSADTDHRAVRKLQRAMERSRQATNPDNYETVEVVRHGKKHKSLKVKSGRLQWRFSKRSENLRAELAEIFRLSAATRKREHGEICNWLLDHAGHIIVEDNSYKAFQKGHFGKSIRRHAPAAFYTQLTSKAESAGLQVTVVSPRKLKPSQHNLLTDTFVKHELWERRVRLGNDDDDRWIDRDAAACLNLLYADIDKQTYDPKRIREAVLAGVTAWLDAGVVVIQAREGITEREFGRFRRRGIPSLTVQGLRQQGFRGRSDSKSGTTPRRKASTVSKPSHFSGEVV

SEQ ID NO: 3434 - protein, 531 aa, Unknown
  Description of Unknown: uncultivated organism sequence
  Category: MG91 effectors
  Description: MG91-626 effector
MNEVFVLELPLQVEKYQADILNKRYEQLRQLYNYVQGKLLRQYRYFEQMKEFQDCKTFKAKREFIKAHPFQIKGVMGRNKELLDIFFDEYGILGLITKLGQKPIGSGKTYTDMGISSTILANLSNSIWSSWNKKLYDYHADRISFKKYGGLNTFGSGKIIQKKDNEVKEYFPGMVLHLDRMEIDIKTNGGLGKKATFITLPILHNPKHADYEMNALSGGSSSIKVLTIVRRMIRGQYKYYLQMSIEGEKPQKGRLLGKGNVGIDLGPTTVAVSGENIVSIDKLASKCDDIQEVITRLSRKIDRSRRANNPQNFNEDGTIKRGIKLVWNDSKRYKELRRELAELRRKQAAIRKQQHIDRANALLKEGDTFIVENNQISSWTTRAKETKVNEKTGKIQKKKRFGKSIANHAPSMFINILENKVKSLGGKVVKGDTKNAASQYDFTDGSFTKHELKERNVTLSNGDTHQRDMLAAFNLQHLKYNEAEAKQYDTEAMAADYERFCQLEQEEILRYKNKEKKDDRSTIGAEELLKT

SEQ ID NO: 3435 - protein, 410 aa, Unknown
  Description of Unknown: uncultivated organism sequence
  Category: MG91 effectors
  Description: MG91-627 effector
MRATAEWQTARAMPKNSERTKAFRDLRVRFRLSEYDFHADVAMHRKASGRGHLLGINECQKLASRAWISVERHLYNGDAPRFISSRRGLHSIEGKSNRTGIIWKADQQCVTVCKRVYRVRVDKRDDWLTRALQDPTDPKKPRKVKYCRIVREMRKGKERFFLQLVAEGTSPLKHAYAGKDLHMAIDPGLGSLTYATEDGTIAKVQIAPSADTDRRAIRRIQRAMERSRRTTNPDNYEAVDVVRHGKKKKSFKVKSGRLQWRFSKRYEKLRSELAEMLRLCTATRKREHGEVCNWLLGHAGHIIVEDNSYKAFQRGRFGKTIGRHAPAALYAQLTNKAESAGLLVEVVSPKKLKPTQHNLLTGQFVKHELWERRVRLGEDDDERWIDRDAAACLNLLYADIENQIRPGTDP

SEQ ID NO: 3436 - protein, 1347 aa, Unknown
  Description of Unknown: uncultivated organism sequence
  Category: MG91 effectors
  Description: MG91-628 effector
MEEKEYYLGLDMGTNSVGWAVTDPQYTILRAKGKDMWGIREFESAETAEKRRGHRTSRRRRQREVVRMGLVKDYFSDAINNVDGNFYARLENSKYHLEDKDEAVRNKNGIFADEHYTDKEYYAEYPTIYHLIMELINNPAPHDVRLVYLAVANLFKRRGHFLNAGLSEDGGNQSMQTAYDGFNTTCNETLGFSFPGINATQIEEVLKNRNYSKTVKSEKLAELLGVEKKEKQRIEILRAIAGRKVNAKVIFPNVETEDKVEFSFSDAAFDDNATELMTLLGDECYSLVLCMREMYDIGTLAEIMHGCQYLSESRMADYQKHHEDLVLLKSVIKSECTQKQYDELFRLDGEGSYSAYVNSTLAKNHKQRRSMKGRTRDDFYKKVRGLIGKSSNPDAIKICTEIENETFMPKMLTSANGIIPNQVHYKELKAILSNAEKYLSFLLEKDESGLTTSDRIQRLYKFRIPYYVGPVSNRDGKGNGWAVRKEEGTVLPWNLEEKIDLSKTKEAFIENLIRRCTYISDEKVLPKNSLIYEKFTVLNEINNIRINDERISVDLKQDIYNELFKKGKKVTRKTLAKYLINRGVIEAENQISGIDIAINNSLSSYGKFKAVFGESMDTDTTKKMVEDIIKTSTIYGDDKRELKNILRDKYGEILSEDQIKRIAGFRFKDWGRLSRAFLELAGADCRTGEVTSIIQALWESQLNLMELLHSEDYTFGESLNEKLVKNEKSLSEITAEDLDDYYFSAPVKRMAWQTILLIKEISKIKGCEPSKIFIEMTRTDEEKGDKGRKNSRAKELTALYKNIKKEGKAWIELIGKEDASGRLKSKKMYLYIKQMGRDMYTGEQIDLDRLFDDNLYDIDHIYPRHFVKDNNIENNLVLVNKAKNSRKSDNYPLDSDIVRNPKVRELWEMLHTNHLMSDEKYHRLTSRKAFTDEDMAGFIARQLVETGQATKGVADLLKDLTNSEIIYSKAGNVSDFRHAYDIPKSRIVNEFHHAHDAYLNIVVGNAYYTKFTSNPLNYIRNEYKKNTKENNYHLNKIFESTISRNGYVAWLAGSDKNPGTIQTVKKMLSRNTPLMTRMTFVIHGSIAKETLCGKNIAKEDSYLPLKGSDPRMSVEKYGGFNKASGAYFFLVEHELKGKKVRTIETVPVYLMKKLSDERELQKYCEEKLGLINPSIRLKQIKMQSLIKLNGYFVNVTGRTNKQLTLRNAVNLKLDKEDIYIIHLVEKCIGEERDDRLSEESILSLYQTLTEKQASGIYRNRPNSVYEKLNEGMIRFKNLERKQQIKVLANILNLTMVGKAQADLKDIGGSANSGVMLMAKKINNYNEVKLINQSVTGLYQTEVDLLTV

SEQ ID NO: 3437 - protein, 525 aa, Unknown
  Description of Unknown: uncultivated organism sequence
  Category: MG91 effectors
  Description: MG91-629 effector
MEEVFVLELPLQVEKYQEDILNKRYEQLRQLYNYVQGKLLRQYRYFEQMKEYQTCKTFKEKRDFFRSHPFHINGVYGNNKELLDITFDEYGINGFVGKMGKKLVNAGTTYADLGITSTLLDRLSLAIWAAWEKMLYDYHAKRISFKKYGELNIFGSRKKTNGSGKKMFSGMELHLETMTLSIKLNGKVGKNAKFITLPILHNPKHVDYEMMALKGGFDSVKVITVVRRMVRGRYKYYLQMSIEGEKPKKGRTLGKGNVGIDLGPTTIAVSSENIASIDKLASKCDNIEVEKKRLGRKIDRSRRANNPGNFNEDGTIKRGVRLTWNDSKRYKALRREMAELQRRQAAIRKQQHINRANALLKEGDTFIVENNQISGWTRKAKETKVNEKTGRIQKKKRFGKSVANHAPAMFVTILENKVKSLGGEVVKVDTQNAASQYDFTNNSFEKHELKERSVTLSNGDIHQRDMLAAFNLQHLKFDESEKKQYDREAMAQHYERFCELEQEEIMRYKSKEKKDDRSTIGAEKL

SEQ ID NO: 3438 - protein, 522 aa, Unknown
  Description of Unknown: uncultivated organism sequence
  Category: MG91 effectors
  Description: MG91-630 effector
MDKEVFVIEFPLNVEKWQADILNKRYEHLRTLYNYVQGKLLRQYIYFAKMGEYKNCKTPKERREFFKTHAFHIKGISGRNKFSLDITFTEYGIHSLVTKLAQHRIGADCTYGDKGINSMILDHMAAYIWSSWNKKLYDINARRISFKNFGEINTFGVRKINGARFCGLNLHLDIMTLDIKVNGKNGQQAKFISLPIRYNLKHADYEMNALAGGFDSIKVLTVVRRMVRGRYKYYLQMTIEAVKPQKGRHLGNGRVGIDIGPTTIAVSSNSTVSIDKLAAKCDNIEQDIQRIGRKIDRSRRAMNPDNFNADGTVKRGVRLTWVKSERYKALCQEKAELQRKQAAIRKAQHIERANTLISEGDTFIIESNPIKGWTARAKETKVSEKTGRIQKKKRWGKSVANHAPSMFVTILENKVKSLGGTVIKADVKNAASQYDFTDGTFNKHELDERGVTLSNGDTHQRDMLSAFNLQHLIYDAKELKQYDQQQMEIHYPRFCELEQQEIEKYKQRIKTDDRSTIAASRL

SEQ ID NO: 3439 - protein, 530 aa, Unknown
  Description of Unknown: uncultivated organism sequence
  Category: MG91 effectors
  Description: MG91-631 effector
MRTSSIIVSYELTLPQRIYPHLDRLFSVFGRSVRDFIDRFWNESTLELLSQKGHVCSIIKEIVQKPQNLPSRVFRNALELSGQILRSQIERKKLFDTFMQYPCLVLYDEKEIAKSLNTSIWFALNVKRQVLKLLRKGERGDYFSLVKPSFSNSVVITSADDSLERGQFKKLRIEKNKLLFELKVPIGNTWKWVKVTKFIPDRLRKALRNAKEIKAPLIKRVTLKSGFTIYRLVIPVEVELRVKNRVERVFALDLSPSEKRLGVGVVVDKEGHSKPVLFTAYKMVRKLERLYGEISGLERKIDNIADDLHSTFKKGHKERLNQRLRHLYQEQKLRWRKFKELRKQILETFINLVIAHAKAYSCDAIAIEDLKFKDLPDWENKRFRRLFSTWFYSRLEERLRHKAQREGIKVLSVNPFNTSQVCHECGSKGKANRFEFVCESCGKRFDRDYNASVNIGIKALTLACKTKSKPYMGEDIPARVSSLQVLTRYKFKALLTLLSFLKLLAYLRLVETSYLKLKSLLKCISADKYG

SEQ ID NO: 3440 - protein, 525 aa, Unknown
  Description of Unknown: uncultivated organism sequence
  Category: MG91 effectors
  Description: MG91-632 effector
MNEVFVLELPLQVEKYQADVLNKRYEQLRQLYNYVQGKLLRQYRYFEQMKEYQACKTIKEKRDFFRSHPFQINETLKGNKIPFMVSFDEYSIKGFVEKLAQKPVGANMTFADLGFTTYILDHLGASIWAAWDKMLYDFKAKRISFKKYGELDSFSSRRKLVGGKVYFSGMEVHLDTMELAIKINGKQSNNAKFITLKILHNPKHADYELWALKGGVNSVKVVKVVRRLVRSQYKYYVQLTIEGEKPQKGRRLGKGNVGIDLGPTTVAVSGVNVVSIDKLASKCDDIQEEITRLSRRIDRSRRANNPQNFNEDGTIKRGIKLVWNDSNRYKELRRELAELRRKQAAIRKQQHIERANALLKEGDTFIVENNPISSWTTRAKETKVNEKTGKIQKKKRFGKSVANHAPSMFVSILENKVKSLGGDLVKVDTKNAASQYDFTNNSFTKHELKERNVTLSNGDTHQRDMLAAFNLQHLQYDEKDDKQYDTEAMTADYERFCQLEQEEILRYKNKVKKDDRGTIGAEKLY

SEQ ID NO: 3441 - protein, 530 aa, Unknown
  Description of Unknown: uncultivated organism sequence
  Category: MG91 effectors
  Description: MG91-633 effector
MTSQSFVIELPIAVDDAEMRTIVRKLEFARQLHNATLGTAMGQLQQMRQDAAWKEACVMPKGKERAAAFRALDRKYGLTEYDLHSVIAGHREGSGRKAELGINETQKIATRVFQAINRFKLGLGGMPRFKSSKRGLHSIEGKTNKTGLKFRPEKKVLNWCGHDYRVLIDPKDDYIQRALKENERSDKYRKIKYCRLVRKRIRSSDRFFLQVVLEGTAPVKHVYAPVTERAAIDPGPQSIALFSKEFAGKIQVAGSNNFNEAVSRRLLRAMDRSLRRNNPDAYNENGTIKKGAKLVKSKNYQRKVDRLREMHRVAAAERKCRHGQTINLLLSIAGDIRIEKNSWKAFQRGHFGKSLGKSAMSGFIAQLKSKAASAGLKVTEVNPYKLKLSQYDPYTDTYRKKDLSERWQEMKAGSGLYIQRDVLSALLLYCADIEKEIHIPKVAVEQLEGAKQFLTDAGYVVLKSTSSRDQRDPRLASEPKAMTPEMARQKILRGAGDSHLPTDQELGRIRAGGKVSTWSKETFPLQRGVV

SEQ ID NO: 3442 - protein, 385 aa, Unknown
  Description of Unknown: uncultivated organism sequence
  Category: MG91 effectors
  Description: MG91-634 effector
MAHKENQKAFVVTFPLRTEKWQEDRIDKMMRMLTTFYNDRQRKLVRRYIYLSHSKAYKEAKGKGVVAFKNYMKENGFSQYGLNAFFKADTKGALYQCGLNSMFLQYLSQCAWSAWDKKLFGKGDFVKTDKVVNIFCSRNKKERFCGFDYDLSTFTISIKSTYAKKIICTIPFVVNKKSDYELFALSQRICRIGIVRKLIRGKYKYYVQFTFDGVPYNKVRNIGTGIVGIDPGPSKIAIVGDNKVEIAKLAPNIEEDERKTARLKRKLDRSRRATNPHMYKEDGTTIKGQRQTCFSKVYNETRKQLADAQRKLAAKRKIAHNELANTLLEYGDTFKVEANSYKSMQARAKATSMTKSGRIRSKKRYGKSIKNRAPSEFLVILNNSL

SEQ ID NO: 3443 - protein, 537 aa, Unknown
  Description of Unknown: uncultivated organism sequence
  Category: MG91 effectors
  Description: MG91-635 effector
MSTKSFIINLPIITGDQDRRRLRKSFSFGCNLQNAVMGGGWDRVLKMRATPEWQTARAMPKSSERTKAFRDLRVRFRLSEYDFHADVAKHRKASGRGHLLGINECQKLASRAWISVERHLYNGGSPRFISSRRGLHSIEGKTNRTGIIWKADQQCVTVCKHVYRVRVDKRDDWLTRALQDPTDPTRPRKVKYCRIVREMRKGKERFLLQLVAEGTSPLKHAYAGKDLRMAIDPGLGSLTYATEDGTIAKVQIAPSADTDHRAVRKLQRAMERSRQATNPDSYETVEVVRHGKKHKSLKVKSGRLQWRFSKRSESLRAELAEIFRLSAATRKREHGEVCNWLLGHAGHIIVEDNSYKAFQRGRFGKTIGRHAPAALYAQLTNKAESAGLLVEVVSPKKLKPTQHNLLTGQFVKHELWERRVRMGNDDDDRWIDRDAAACLNLLYADLEKQTYAPERIREAVLAGVTAWLDAGVVVIQAREGITEREFGRFRRRGIPSLTVQGLRQQGFRGRSDSKSGATPRRKASTVSKPSHFSGEVV

SEQ ID NO: 3444 - protein, 528 aa, Unknown
  Description of Unknown: uncultivated organism sequence
  Category: MG91 effectors
  Description: MG91-636 effector
MNEVFVLELPLQVEKYQADVLNKRYEQLRQLYNYVQGKLLKQYRYFEQMKEYQACKTIKEKRDFFKNHPFQINEKQKSSEIPFNVYFDEYSLKGYIEKLVQKSVGPNMTYADLGFTTNILDHLGASVWAAWDKKLYDLKAKRISFKKYGELDSFSSRRKVVRGVVYFSGMELHLDSMELAIKMNGKVGKDAKFITLKMLHNPKHADYELWALKGGVDSVKVVKVVRRLVRSQYKYYVQLTIEGEKPQKGRTLGKGNVGIDLGPTTVAVSGVNVVSIDKLASKCDNIQEEITQLSRKIDRSRRANNPQNFNEDGTIKRGIKLVWSDSKRYKELRRELAELRRKQAVIRKQQHIERANALLKEGDTFIVENNPISSWTTRAKETKVNEKTGKIQKKKRFGKSVANHAPSMFVSILENKVKSLGGRFERVSTQNAASQYDFTTDTFKTGEEKHKLNERAITLSNGDTHQRDMLAAFNLQHLKYDEKDAKQYDTEAMTADYERFCQLEQEEILRYKNKVKKDDRSTIGAEKL

SEQ ID NO: 3445 - protein, 537 aa, Unknown
  Description of Unknown: uncultivated organism sequence
  Category: MG91 effectors
  Description: MG91-637 effector
MSTKSFIISLPIITGDQDRRRLRKSFSFGCNLQNAVMGGGWDCVLKMRATPEWQAARAMPKGSERTKAFRDLRVHFRLSEYDFHADVAKHRKASGRGHLLGINEGQKLASRAWISVERHLYNGGSPRFISSRRGLHSIEGKTNRTGIIWKADQQCVTVCKHVYRVRVDKRDDWLTRALQDPTDPTKPRKVKYCRIVREMRKGKERFLLQLVAEGTSPLKHAYAGKDLRMAIDPGLGSLTYATEDGTIAKVQIAPSADTDHRAVRKLQRAMERSRRATNPDNYEAVDVVRHGKKKKSFKVKSGRLQWRFSKRYESLRAELAEIFRLSAATRKREHGEVCNWLLGHAGHIIVEDNSYKAFQRGRFGKTIGRHAPAALYAQLTNKAESAGLLVEVVSPKKLKPTQHNLLTGQFVKHELWERRVRLGEDDDERWIDRDAAACLNLLYADLEKQTYAPERIREAVLAGVTAWLDAGVVVIQAREGITEREFGRFRRRGIPSLTVQGLRQQGFRGRSDSKSGTTPRRKASTESKPSHFSGEVV

SEQ ID NO: 3446 - protein, 484 aa, Unknown
  Description of Unknown: uncultivated organism sequence
  Category: MG91 effectors
  Description: MG91-638 effector
MAHKENQKAFVVTFPLRTEKWQEDRIDKMMRMLTTFYNDRQRKLVRRYIYLSHSKAYKEAKDKGVVVFKNYMKEHGFSQYGLDAFFKADTKGALYQCGLNSMFLQYLSQCAWSAWDKKLFGKGDFVKTDKVVNIFCSRNKKESFCGFDYDLSTFTISIKSTCTKKIICTIPFVVNKKSDYELFALSQRICRIGIVRKLIRGKYKYYVQFTFDGVPYHKGRNIGTGIVGIDPGPSKIAIVGDNKVEIAKLAPNIEEDERKTARLKRKLDRSRRATNPHMYKEDGTIIKGQRQTCFSKAYNETRKQLADAQRKLAAKRKIAHNELANTLLEYGDTFKVEANSYKSMQARAKATSMTKSGRIRSKKRYGKSIKNRAPSEFLVILKNKLLYYPKGKYYDVPSSYACTQFDFTNESFTEHKISERRIVTSDGIQHNRDTLAAFNIKNAIVNDTSTKKKKVTKSKEFLDIVKMKASYNEFCVMERYLLSV

SEQ ID NO: 3447 - protein, 609 aa, Unknown
  Description of Unknown: uncultivated organism sequence
  Category: MG91 effectors
  Description: MG91-639 effector
MSKENFVLTLPLKVEKWQADILDKRYELLRQVYNMVQQKLLRQYIYFSQQKAYKECGKDTKKKGKFFAEHPFFIKIDGKPCEVKFPTWKKSNQTASNSIAKYVSKLSSYKLGQDKTLSDFGINSYILEELGARIMKAWEDRLYKFKAKHISKREYGDVNSFSTRIKKSDNKISYPGFTINLEEGYITYNTNGRRGGFANLIKLPIDFSREKKGYAVEALKGGLESIREISVVRKYIRGKNKYYLQLTIDGEKPQKGRTLGRGNVGIDIGPSTIATSSLMGVHFDKLADKCDDIEHELYLVNRKLDRSRRATNPQNYNADGTFKTIKNRERRVWNYSNRYNKLKLVRKELFRRQAEIRKQQHLAMANALLSQGDTFIVENNPIDAWVRRAKETTKNKKGNYRCKKRYGKSVAHHAPAMFVSILENKVKSLGGELHKVDVGYAATQFDFTNGEFTKHAVNERSITLSNGHTHQRDMLSAFNLQHARLKTEGRNIEKTVDNYDIEQMNADYPIFCRLETAEQERFKAIRHYERDALFFVGVSNKHLRCQPQEETVANRHNGGVGRKDCNISLGSENAEITGNGLIRESIARVSQVPDECHPFAGKPIVLDGL

SEQ ID NO: 3448 - protein, 497 aa, Unknown
  Description of Unknown: uncultivated organism sequence
  Category: MG91 effectors
  Description: MG91-640 effector
MPSPTFIIELPIRVNDSESRTILRKLEFARQLHNATLGTALGQLQQLRQDSEWKRACLMPKGKERSELFRKLDRKYRLTEYDLHAVIAKHRQASGRKAELGINETQKIATRVFHAVNRYKLGLGGRPRFKSLSRGLRSIEGKSNKTGLKFNIEKSVLSWCKHDYRVFIDPQDDYLQRALRSEDRGGFKKVKYCRLVRKTIKGKNRFYLQVVLEGQAPIKHIYASTNERLSIDPGPQTIAVFSDVWAGKIKVSPNAQVDEKKIRRLQRSMDRSLRKSNPDCYENDGTLKKGCVLKKTKGCEKRIQRLQECHRKAVATRRCEHGQLINLLLSVAGDIRVEKNQWKAFQKGHFGKSLGKSGISGFIERLKSKAESAGLKVTEVKPYKLKLSQYDPYTDQYRKKSLNERWHSLGESSEWIQRDVMSALLLQCADLEEEKHIPTEVIKTLEGAKQLLRDAGYVILKPSSNGESNPAFASEPKAVTPEKVRLEIFCGASDSYL

SEQ ID NO: 3449 - protein, 491 aa, Unknown
  Description of Unknown: uncultivated organism sequence
  Category: MG91 effectors
  Description: MG91-641 effector
MRATPEWQAARAMPKGSERTKAFRDLRMRFRLSEYDFHADVAKHRKASGRGHLLGINECQKLASRAWISVERHLYNGGSPRFISSRRGLHSIEGKTNRTGIIWKADQQCVTVCKHVYRVRVDKRDDWLTRALQDPTDPKKPRKVKYCRIVREMRKGKERFLLQLVAEGTSPLKHAYAGKDLRMAIDPGLGSLTYATEDGTIAKVQIAPSADTDHRAIRRIQRAMERSRRATNPDNYETVEVVRHGKKHKSLKVKSGRLQWRFSKRYESLRAELAEIFRLSAATRKREHGEVCNWLLGHAGHIIVEDNSYKAFQRGRFGKTIGRHAPAALYAQLTNKAESAGLLVEVVSPKKLKPTQHNLLTGQFVKHELWERRVRLGEDDDERWIDRDAAACLNLLYADIENQTYAPERIREAVLAGVTAWLDAGVVVIQAREGITEREFGRFRRRGIPSLTVQGLRQQGFRGRSDSKSGATPRRKASTVSKPSHFSGEVV

SEQ ID NO: 3450 - protein, 588 aa, Unknown
  Description of Unknown: uncultivated organism sequence
  Category: MG91 effectors
  Description: MG91-642 effector
MVQRKLVRQYIYFAQQKEYKACENFQQRRDFFASHPFHFKGINSKNGEPADIKFPYTYESRSSNSGKRPSGGISDYVSKLWAHRVGADKTLANLGINSYILEELGLHIMKAWEKRLYDPRSSRVSFKDYGEVNSFGSRYKKDKQTGKVSFPGFTIYLEKDKNEVVKGGFITYNTNGKRSQPRPFVLPIDFSREKKDYAAYALKGGIDSLRKLIILRKNIRGRNKYYLQLTISGEKPQKGRTLGQGNVGIDIGPSTIATSSLQGVHFDKLADKCDNIEHELYLINRKMARSRYENNRQNYNADKTIKRGVRLVWKKDKDVKRYASLKLKRRELYRRQAEIRKLQHLEMANAMLSQGDTFIVENNPIDAWVRRAKETTKTKTGRNRCKKRYGKSVANHAPAMFVTILKNKVESLGGKFYEVDVRYAATQFDFTNGVKTKHEVSERSITLSNGRTHQRDMISAFNLQHIKLESIGTEVKEYDIEQMQADYPIFCRLEAAEQERFKMARHNERDALYFVGASEKQLRHQPQDESAANRHNGGVGRKHCNIRLGNENAEITGSGLVRESIERVSQVPDECHISGHQPIVLDGL

SEQ ID NO: 3451 - protein, 544 aa, Unknown
  Description of Unknown: uncultivated organism sequence
  Category: MG91 effectors
  Description: MG91-643 effector
MRVCCHHVVLITQKCRLLNKMNEVFVLELPLHVEKYQADILDKRYEQLRQLYNYVQGKLLRQYRYFEQMKEYQGCKTFKEKKDFFRSHPFKINETLKDSKTPFMVSFDEYSIKGFVEKLAQKSVGPNMAYSDLGFTTYILDHIGASIWAAWDKKLYDFKSNRISFKKHGELDSFSSRRKIVRGIVYFSGMELHLDTMELAIKINGKVGKEARFITLKMLHNPKHADYEMWALKGGVESVKVVKVVRRLVRSQYKYYVQLTIEGEKPQKGRTLGKGNVGIDLGPTTVTISGKNIVSIDKLASKCDNIQEEITRLSRKIDRTRRANNPQNFNEDGTVKRGIKLVWNDSKRYKELRRELTELRRKQAAIRKQQHIERANALLKEGDTFIVENNPVKAWSARKKETKIDEKTGKYKSKKGYGKSIGNHAPAMFIDILENKVKSLGGRLERVDTQNAASRFDFTDGSLTEHDRSERAITLSNGDTHQRDMLAAFNLQHLKLDEAKTKQYDTETMAADYKRFCQLEKEEIQRYKNKEKKDDRGTIGAGKL

SEQ ID NO: 3452 - protein, 525 aa, Unknown
  Description of Unknown: uncultivated organism sequence
  Category: MG91 effectors
  Description: MG91-644 effector
MNEVFVLELPLQVEKYQADLLNKRYEQLRQLYNYVQGKLLRQYRYFEQMKEYQACKTIKVKRDFFKNHPFQINETQKGSEIPFKVSFDEYSIKGYIEKLVQKPVGPNMTYADLGFTTNILDHLGASIWAAWDKKLYDFKAKRISFKKYGELDSFSSRRKVVRGVVYFSGMELHLDTMELAIKMNGKVGKEAKFITLKILHNPKHAEYEMWALKGGVDSVKVVKVVRRLVRSQYKYYVQLTIEGEKPQKGRTLGKGNVGIDLGPTTVAVSGMNIVSIDKLASKCDNIQPKITRLSRKLDRSRRANNPDNYNEDGTIKRGVKLVWKKEKDLKRYSKLKRELAELRRKQAAIRKQQHIDRANELLKEGDTFIVENNQISGWTTRAKETKVNEKTGKIQKKKRFGKSVANHAPSMFVSILENKVKSLGGEVMKVDTKNAASQYDFTDNSFTKHELKERNVTLSNGDTHQRDMLAAFNLQHLKLEGTKQYDTEAMAADYVRFCQLEQEEIQRYKNKEKKNDRGTIGAEKL

SEQ ID NO: 3453 - protein, 530 aa, Unknown
  Description of Unknown: uncultivated organism sequence
  Category: MG91 effectors
  Description: MG91-645 effector
MTSQSFVIELPIAVDDAEMRTIVRKLEFARQLHNATLGTAMGQLQQMRQDAAWKEACVMPKGKERAAAFRALDCKYGLTEYDLHSVIARHREGSGRKAELGINETQKIATRVFQAINRYKLGLGGMPRFKSSKRGLHSIEGKTNKTGLKFRPEKKVLNWCGHDYRVLIDPKDDYIQRALKENERSDKYRKIKYCRLVRKRIRSSDRFFLQVVLEGTAPVKHVYAPVTERAAIDPGPQSIALFSKEFAGKIQVAGSNNFNEAVSRRLLRAMDRSLRRNNPDAYNEDGTIKKGAKLVKSKNYQRKVDRLREMHRVAAAERKCRHGQTINLLLSIAGDIRIEKNSWKAFQRGHFGKSLGKSAMSGFIAQLKSKAASAGLKVTEVNPYKLRLSQYDPYTDTYRKKDLSERWQEMKAGSGLYIQRDILSALLLYCADIEKEIHIPKVAVEQLEGTKQFLTDAGYVVLKSTSSRDQRDPRLASEPKAMTPEMARQKILRGAGDSHLPTDQELGQIRAGGKVSTWSKETFPLQRGVV

SEQ ID NO: 3454 - protein, 539 aa, Unknown
  Description of Unknown: uncultivated organism sequence
  Category: MG91 effectors
  Description: MG91-646 effector
MNEVFVLELPLQVEKYQADILNKRYEQLRQLYNYVQGKLLRQYRYFEQMREFQTCKTFKEKKDFFRRHPFHIDGILGSNKELFDITFDEYGINGFVGKLGKKQVSAGVTYADLGITSTLLDRMSLAVWAAWDKMLYDYHARRVSFKKHGELNIFGSRKKTNGSGKKVFSGMELHLEKMEVAIKLNGKVGKAAKFITLPILHNPKHEDYEMWALKGGFDSVTVLTIVRRLVRGQYKYYVQLTIEGEKPQKGRTLGKGNVGIDLGPTTVAVSGENVVSIDKLASKCDNSQEEITRLSRKIDRSRRANNPQNFNEDGTIKRGVKLVWNDSKRYKELRRELAELRRKQAAIRKQQHIDRANALLKEGDTFIVENNPVKAWSAKKKETKIDEKTGRYKSKKGYGKSVGNHAPAMFVDILENKVKSLGGRFERVNTQNAASQYDFTTDSFKTGDEKHKLNERAITLSNGDTHQRDMLAAFNLQHLKLDEAKTKQYNTEAMKADYERFCEMEQEEIMRYKNLEKKDDRATIGAVDLWKESDEMKKE

SEQ ID NO: 3455 - protein, 530 aa, Unknown
  Description of Unknown: uncultivated organism sequence
  Category: MG91 effectors
  Description: MG91-647 effector
MNEVFVLELPLQVEKFQTDILNKRYEQLRQLYNYVQGKLLRQYRYFEQMKEYQACEKFREKKDFFKSHPFHINETLKGNKTPIKVSFDEYSIKGYIEKLAQKPVGPNMTYADIGFTTYILDHLGASIWSAWDKKLYDFKAKRISFKKYGELDSFSSRRKVVRGIVYFSGMELHLDTMELAIKLNGKVGKEAKFITLKILHNPKHADYEMWALKGGLESIKVVKVVRRMVRSQYKYYVQLTIEGEKPQKGRTLGKGRVGIDLGPTTVAISSENVVSIDKLASKCDNIQDEITKLSRKIDRSRRANNPQNFNEDGTIKRGIKLVWNDSKRYKELRRELAELRRKQAAIRKLQHIERANALLKEGDTFIVENNPVNAWVRRAKETKIDEKTGKYKSKRGSGRSVGNHAPAMFVDILENKVKSLGGRFERVTTQNAASQYDFTTDSFKTGDEKHKLNERAITLSNGDTHQRDMLAAFNLQHLKLDEAKTKQYDTEAMAADYERFCQLEQEEIMRYKNKEKKGDRGTIGAEYIHK

SEQ ID NO: 3456 - protein, 544 aa, Unknown
  Description of Unknown: uncultivated organism sequence
  Category: MG91 effectors
  Description: MG91-649 effector
MNLDSRVMNVSPRIVIRQSKVKEVFVLELPLRVEKYQADLLNKRFEQLRQLYNYVQGKLLRQYRYFEQMKEYQACKTFKEKKDFFRKHPFHINGILGSNKKPLNITFDEYGIRGFVEKLVQKGVGASMTYADLGFTTSILDHLSSGIWSAWDKMLYDYKARRISFRKYGELDSFSSRRKVVQGKIYFSGMELHLDSMMLSVKMNGKVGKAAKFITLPILHNPKHADYEMWALKGGLDSIKVVKVVRRMVRGRYKYYLQMSIESEKPLKGRKLGKGNVGIDLGPTTVAVSGENIASIDKLASKCDSIETEKAKLGRKIDRSRRANNPQNFNEDGTIKRGVRLVWNDSKRYKALRGEMAELQRRQSAIRKQQHIDRANELLKEGDIFIVENNQISGWTRKAKETRVDESTGRIRKKKRFGKSVANHAPSMFVNILENKVKSLGGQLVKVDTQNAASQYDFTDGSFTKHELQERNVTLSNGDTHQRDMLAAFNLQHLKYDEAEKKQYDREAMSKHYERFCELEQAEILRYKNKEKVDDRSTIGAKEL

SEQ ID NO: 3457 - protein, 507 aa, Unknown
  Description of Unknown: uncultivated organism sequence
  Category: MG91 effectors
  Description: MG91-650 effector
MKEQILSYELTLPQRIYPHLERLFSVFKNQVNSYIPKLWNEEGFKLLSQKSHAWGILKKEFPTPIGLPSRVFRNVLELTGQIIRSQIERKEVFEKLLRREELKGYDKRFVLNVQRQIENLRKKGKEVSCYFDLPYPEFDGNVVITSADDNFEKGQFRRLKISGNFLEFSIKVPTQKGWEWIKVKKLIPERLRKALMKAKEVKAVLIKKVLLKSGYNIYRLVIPLSFEVKEPEKVERVLALDLSPSEKRLGVAVLVEGEEVSKPLFFKTLMLRKVERLYFEVSNLERKIDNIYNSIEKTACKREKKRLWERLRHLFAEQKLKQRKIKQLRKQILETFTNLIVSHAKAYHCQAIVIEDLSFKEVPGWKNKPALRRFSQWFFSRFTSRLEEKAKFHNLKVMKVNPAYTSRVCHKCGKEGELEGLVFKCSCGTYDRDYNASVNIAFRLTKPKAQRAEGIPGRIPSRLVRVEWKALLSFISFSKLLAWLRIVETSQLKLKKLLKWIGSDKYD

SEQ ID NO: 3458 - protein, 531 aa, Unknown
  Description of Unknown: uncultivated organism sequence
  Category: MG91 effectors
  Description: MG91-651 effector
MNEVFVLELPLQVEKYQADILNKRYEQLRQLYNYVQGKLLRQYRYFEQMKEFQDCKTFKAKREFIKAHPFQIKGVMGRNKELLDIFFDEYGILGLITKLGQKPIGSGKTYTDMGISSTILANLSNSIWSSWNKKLYDYHADRISFKKYGGLNTFGSGKIIQKKDNEVKEYFPGMVLHLDRMEIDIKTNGGLGKKATFITLPILHNPKHADYEMNALSGGSSSIKVLTIVRRMIRGQYKYYLQMSIEGEKPQKGRLLGKGNVGIDLGPTTVAVSGENIVSIDKLASKCDDIQEVITRLSRKIDRSRRANNPQNFNEDGTIKRGIKLVWNDSKRYKELRRELAELRRKQAAIRKQQHIDRANALLKEGDTFIVENNQISSWTTRAKETKVNEKTGKIQKKKRFGKSVANHAPSMFVSILENKVKSLGGKVVKVDTKNAASQYDFTDGSFTKHELKERNVTLSNGDTHQRDMLAAFNLQHLKYNEAEAKQYDTEAMAADYERFCQLEQEEILRYKNKEKKDDRSTIGAEELLKT

SEQ ID NO: 3459 - protein, 525 aa, Unknown
  Description of Unknown: uncultivated organism sequence
  Category: MG91 effectors
  Description: MG91-652 effector
MTSQSFVIELPIAVDDAEMRTIVRKLEFARQLHNATLGTAMGQLQQMRQDAAWKEACVMPKGKERAAAFRALDRKYGLTEYDLHSVIARHREGSGRKAELGINETQKIATRVFQAINRYKLGLGGMPRFKSSKRGLHSIEGKTNKTGLKFRPEKKVLNWCGHDYRVLIDPKDDYVQRALKENERSDQYRKIKYCRLVRKRIRSADRFFLQVVLEGTAPVKHVYAPVTERAAIDPGPQSIALFSKAFAGKIQVAGSNNFNEAASRRLLRAMDRSLRRNNPDAYNEDGTIKKGAKLVKSKNYQRKVDRLREMHRVVAAERKCRHGQTINLLLSIAGDIRIEKNSWKAFQRGHFGKSLGKSAMSGFIAQLKSKAASAGLKVTEVNPYKLKLSQYDPYTDTYRKKDLSERWQEMKAGSGQYIQRDILSALLLYCADIEKEIHIPKAAVEQLEGAKQFLTDAGYVVLKSTSSRDQRDLRLAPEPKAMTPEMARQKILRGAGDSHLPTDQALGRIRAGGKVSTWSKETFPL

SEQ ID NO: 3460 - protein, 510 aa, Unknown
  Description of Unknown: uncultivated organism sequence
  Category: MG91 effectors
  Description: MG91-653 effector
MKEQILSYELTLPQRIYPHLDRLFSVFRSQVNSYIQELWNEKGFELLSQKGSAVGILKEVFPTPECVPSRVFRNILELTGQIIRGQIERKEVFEKLLKEEKVKGYSKNLVLNVQRQIENLRRKGKEVSCYFDLPHPEFDGRIVITSADDNLEKGQFRRVKVDRNFLTFEIKVPMQDGWEWIKVRKFLPGRLRKALLRAKEIQVPLIKRQRLKSGYTIYRLVIPLVFKVKEPEKVERVFAIDLSPGERRLGVGIVMDDEFVSKPIFFKTNLIKKVERIHKEISNLERKIDNIHNAIEDANSKRVKETLFKRLNHLFGEQKRKQRKIKELRKQILETFTNLAIAYAKAYHCQAVAIEKLVFKEVPSWQSSKALRLFTQWFYSKFAKRLEEKARVNELKVIKVNPAYTSKACAKCGREGEFEGLKFICFCGVYDRDYNASLSIAKRALRPTKPEAQGAEGIPGRIPSRLVRMEGSALLTMISLFKLLAWLKVVHTCCLKPQKLFKWIRSDKYG

SEQ ID NO: 3461 - protein, 537 aa, Unknown
  Description of Unknown: uncultivated organism sequence
  Category: MG91 effectors
  Description: MG91-654 effector
MSTKSFTINLPIITGDQDRRRLRKSFSFGCNLQNAVMGGGWDRVLKMRATAEWQTARAMPKSSERTKAFRDLRVRFRLSEYDFHADVAKHRKASGRGHLLGINECQKLASRAWISVERHLYNGGSPRFISSRRGLHSIEGKTNRTGIIWKADQQCVTVCKHVYRVRVDKSDDWLTRALQDPTDPTKPRKVKYCRIVREMRKGKERFLLQLVAEGTSPLKHAYAGKDLRMAIDPGLGSLTYATEDGTIAKVQIAPSADTDHRAIRRIQRAMERSRRATNPDNYEAVDVVRHGKKHKSLKVKSGRLQWRFSKRYESLRAELAEIFRLSAATRKREHGEVCNWLLGHAGHIIVEDNSYKAFQRGRFGKTIGRHAPVALYAQLASKAESAGLLVEVVSPKKVKPTQHNLLTDTFVKHELWERRVRLGNDDDDRWIDRDAAACLNLLYADLEKQTYAPERIREAVLAGVTAWLDAGVVVIQAREGITEREFGRFRRRGIPSLTVQGLRQQGFRGRSDSKSGTTPRRKASTVSKPSNFRGEVV

SEQ ID NO: 3462 - protein, 511 aa, Unknown
  Description of Unknown: uncultivated organism sequence
  Category: MG91 effectors
  Description: MG91-655 effector
MGGMRAIRIAVMTSQSFIVELPIVVDDSERRTIVQKLEYARQLHNATLGTALGQLQQMRQDTAWRQARSMPQGKERTEIFRALDRQYKLTEYDLHAVIARHREESGRKAELGINETQKIATRVYQSVNRYKLGLGGCPRFKSFKRGLHSIEGKTNKTGLKFKPEQSVLSWCGHDYRVLIDPKDDYLQRALKADGQGTGYRKIKYCRLVRRRIRSKEYFYLQVVLEGTAPVKHIYASTNERLAIDPGPQTIAVFSNMFIGKIRVAGNYQLQDAQIRRLQRSMDRSLRANNKDANEENGTLKKGAKLVQTKGYLTRAARLRELHRKAAMHRKCQHGQTVNLLLSIAGDIRIEKNNWKAFQRGHFGKSLGKSAMSGFFNQLRTKAESAGLKVTEVNPYKLKLSQYDPYTETYRKKDLKERWQEMQPGSGQYIQRDVLSALLLLCADLEEEKHIPKAALDRLEGAKQLLKGAGYVIDKPTSNPDQPDPRFAPEPKALTPERARLEILCGTGDSCL

SEQ ID NO: 3463 - protein, 525 aa, Unknown
  Description of Unknown: uncultivated organism sequence
  Category: MG91 effectors
  Description: MG91-656 effector
MEEVFVLELPLQVEKYQEDILNKRYEQLRQLYNYIQGKLLRQYRYFEQMKEFQVCKTFKEKRDFFRNHPFHINGVYGNNKELLDITFDEYGINGFVGKMGKKLVNADTTYADLGITSTLLDRLSLAIWAAWEKMLYDYHAKRISFKKYGELNIFGSRKKTNGSGKKMFSGMELHLETMTLAVKLNGKVGKKAKFITLPILHNPKHVDYEMMALKGGFDSVKVITVVRRMVRERYKYYLQMSIEGEKPQKGRTLGKGNVGIDLGPTTVAVSGENIVSIDKLASKCDNIQAEITRLARKIDRSRRANNPQNFNEDGTIKRGVRLTWNDSKRYKALRREMAELQRRQAAIRKQQHINRANALLKEGDTFIVENNQISGWTRKAKETKVNEKTGKIQKKKRFGKSVANHAPAMFVTILENKVKSLGGEVVKVDTQNAASQYDFTNNNFKKHELNERSVTLSNGDTHQRDMLAAFNLQHLKYDEAEKKQYDREAMSKHYERFCELEQAEIVRYKNKEKADDRSTIGAKEL

SEQ ID NO: 3464 - protein, 612 aa, Unknown
  Description of Unknown: uncultivated organism sequence
  Category: MG91 effectors
  Description: MG91-657 effector
MAKETFVLTLPLKVEKWQADILDKRYELLRQTYNMVHRKLLCQYIYFSQQKAYKACENFQQRREFFESHPFHFKGINGKNGEPSDIKFPYTYESRSSNSGKRPSGGISDYVSKLWSHRVGQDKTLADFGLNGSILEELGLHVMSAWGKRLYDPKASRVSFKEYGDINSFGCRYHKGNFAGFTINLEEGYITYNTNCRRGRFADIIQLPIDFSREKKDYAVYALRGGIDSLRKLIILRKNIRGRNKYYLQLTINGEKPQKGRTLGRGNVGIDIGPSTIATSSLQGVHFDKLADKCDNIEHELYLIGRKMDRSRRANNPQNYNPDGTIKRGVRLTWKKDSEAKRYASLKQKRRELYRRQAEIRKLQHLEMANAMLSQGDTFIVENNPIDAWVRRAKETTKTKTGRNRCKKRYGKSVANHAPAMFVSILKNKVLSLGGAFHEVDVRYAATQFDFTNGVKTKHEVGERRITLSNGRTHQRDMISAFNLQHIKLESIGTEVKEYDIEQMQADYPIFCQLEAAEQERFKEARHAERDALYFIGAQEKQLRHQPQDESVANRHNGGVGRKHCNTRLGSRSKENAKITGSGLVRESIARVSQVPDECHPVGDHPIILDGL

SEQ ID NO: 3465 - protein, 607 aa, Unknown
  Description of Unknown: uncultivated organism sequence
  Category: MG91 effectors
  Description: MG91-658 effector
MAKEEFVLTLPLKVEKWQADILDKRYEMLRQVYNMVQQKLVRQYIYFSQQKAYRDCKNFEQRREFFENHPFHIKGVKGKNGELCDIKFPYTFKSRGGPSGKRAPNGISDYVSKLWSHKIGQNKTLSDYGINSYIMEELGLHIMKAWEDRLYKPKSKRVSFKDYGEINSFGSRKKNGIFVGFTINLDNGIITYKTNGRLGQFADLIQLPIDFCREKSGYAKEALKGGIESLKKLLIVRRYIRGGNKYYLQLTISGEKPQKGRTLGKGNVGIDIGPSTIATSSLKGVHFDKLANKCDNIEHELYLINRKLDRSRRANNPQNYNEDGTIKRGIRLVWKKDKDVKRYATLKQQRKELYRKQAEIRKHQHLEMANAMLSQGDTFIVENNPVDAWVRRAKETTKTKAGKNRCKKRYGRSVANHAPAMFVSILKNKVLSLGGNFYEIDPRNAATQFDFTNGKFTKHEVRERSITLSNGCTHQRDMLSAFNLQHIVLQSKELKEYDIEQMKADYPIFCRLESAEQERFRIARHNERDALYFVGASEKQMRRQPQEKTVANHHNGGVDRKYCNTSLESENVKITGSGLVRESIERVSQVPDECHLFGCDPIVLDGL

SEQ ID NO: 3466 - protein, 524 aa, Unknown
  Description of Unknown: uncultivated organism sequence
  Category: MG91 effectors
  Description: MG91-659 effector
MKEVFVLDLPLRVEKYQSDILNKRFEQLRQLYNYVQGKLLRQYRYFEQMKEYQACKTFKEKKDFFRNHPFHINGILGSNKELLDITFDEYGIKGFVEKLVQKGVGTDMTYADLGFTTYILDHLSAGIWSAWDKMLYDYKARRISFKKYGELDSFSSRRKVVQGKVYFSGMELHLDSMMLSVKMNGKVGKAAKFITLPILHNPKHADYEMWALKGGLDSIKVVKVVRRMVRGRYKYYLQMSIESEKPLKGRKLGKGNVGIDLGPTTVAVSGENIASIDKLASKCDSIETEKAKLGRKIDRSRRANNPQNFNEDGTIKRGVRLVWNDSKRYKALRGEMAELQRRQSAIRKQQHIDRANELLKEGDIFIVENNQISGWTRKAKETRVDESTGRIRKKKRFGKSVANHAPSMFVNILENKVKSLGGQLVKVDTQNAASQYDFTDGSFTKHELQERNVTLSNGDTHQRDMLAAFNLQHLKYDEAEKKQYDREAMSKHYERFCELEQAEILRYKNKEKVDDRSTIGAKEL

SEQ ID NO: 3467 - protein, 529 aa, Unknown
  Description of Unknown: uncultivated organism sequence
  Category: MG91 effectors
  Description: MG91-660 effector
MKEVFVLELPLQVEKYQADILNKRYEQLRQLYNYVQGKLLRQYRYFEQMKDYQACKAFKEKREFFKTHPFHINGVLGRNKELLDITFNEYGILGWVTKLGQMSIGSGKTYADIGITARILANLSDNIWSAWNKKLYDYRSERISFKKYGSLNTFGSGKTILKKGKEIKEYFSGMVLHLERMEIDIKTNGSNGKNATFISLPILHNPKHADYEMMALSGGSSSIKVLTIVRRLVRGQYKYYLQLSIEGEKPQKGRTLGKGNVGIDLGPTTIAVSGENVVSIDKLASKCDNIQTEITKLARKIDRSRRANNPQNFNEDGTIKRGIKLVWNDSKRYKELRRELAELCRKQAAIRKQQHIDRANALLKEGDTFIVENNPVKAWAARAKETKVNEKTGKIQSKKRGGKSIGNHAPAMFVDILENKVKSLGGTFIRANTNNAASQYDFSNNSFKEGEDRHGLNERAITLSNGNTHQRDMLAAFNLQHLTDEKKQYDVEAMKRDYERFCQLEQEEIQRYKNKEKKDDRGTIGAEKL

SEQ ID NO: 3468 - protein, 472 aa, Unknown
  Description of Unknown: uncultivated organism sequence
  Category: MG91 effectors
  Description: MG91-662 effector
MPKGKERAAAFRALDRKYGLTEYDLHSVIARHREGTGRKAELGINETQKIATRVFQAINRYKLGLGGMPRFKSFKRGLHSIEGKTNKTGLKFKPEQKVLNWCGHDYRVLIDPKDDYIQRALKDNERSDQYRKIKYCRLVRRRIRSADRFFLQVVLEGTAPVKHVYAPVTERAAIDPGPQSIALFSKAFAGKIQVAGSNNFNEAASRRLLRAMDRSLRRNNPDAYNEDGTINKGVKLAKSKNYQRKVDRLHEMHRVAAAQRKCRHGQTINLLLSIAGDIRIEKNSWKAFQRGHFGKSLGKSAMSGFIAQLKSKAESAGLKVTEVNPYKLKLSQYDPYTDTYRKKDLSERWQEMKAGSGQYIQRDVLSALLLYCADIEKEIHIPKAAVEQLEGAKQLLTDAGYVVLKSTSSRDQRDPRLASEPKAMTPEMARQKILRGAGDSHLPTDQALGRIRAGEKVSTWSKETFPLQRGVV

SEQ ID NO: 3469 - protein, 525 aa, Unknown
  Description of Unknown: uncultivated organism sequence
  Category: MG91 effectors
  Description: MG91-663 effector
MTSQSFVIELPIALDDAEMRTIVRKLEFARQLHNATLGTAMGQLQQMRQDAAWKEACVMPKGKERAAAFRALDRKYGLTEYDLHSVIARHREGTGRKAELGINETQKIATRVFQAINRYKLGLGGMPRFKSSKRGLHSIEGKTNKTGLKFRPEKKVLNWCGHDYRVLIDPKDDYVQRALKENERSDQYRKIKYCRLVRKRIRSADRFFLQVVLEGTAPVKHVYAPVTERAAIDPGPQSIALFSKAFAGKIQVAGSNNFNEAASRRLLRAMDRSLRRSNPDAYNEDGTIKKGAKLVKSKNYQRKVDRLREMHRVAAAERKCRHGQTINLLLSIAGDIRIEKNSWKAFQRGHFGKSLGKSAMSGFIAQLKSKAASAGLKVKEVNHYKLKLSQYDPYTDTYRKKDLSERWQEMKAGSGQYIQRDILSALLLYCADIEKEIHIPKVAVEQLEGAKQFLTDAGYVVLKSTSSRDQRDLRLAPEPKAMTPEMARQKILRGAGDSHLPTDQALGRIRAGGKVSTWSKETFPL

SEQ ID NO: 3470 - protein, 1128 aa, Unknown
  Description of Unknown: uncultivated organism sequence
  Category: MG91 effectors
  Description: MG91-664 effector
MNKKILSLDLGITSIGYSVIEEFDNDRYSLLDYGVSMFDKATDKDGNSKKILHSQSESSSKLFNLRKQRKKDLSILFDNFKLANKDKLLIQEKQNIYKNKWQLRCVKAFEQKLSINELFTIFYTIAKHRGYKSLESSDLLDELCEELNIPLEITKSNKNEDEKGKIKKSLKNVEELKQNSNKTVASIIYDIEIQKNNPTFRNHDNYNYMIRREYIEEEIINIVKSQVKFGLFESSFNSDIFIQKLKDIITYQNPSTNDMSLFGDCEFYPQFKVANQYSIISDIYKMYQSVSNITFNSKPTIKITKEQINLVANDFFTKLKKGKNILDLKYKDIRKILNLSDDIKIFNKDDDYISKGKKVHHTITKFHFINNLSKFDTNFIINNLSNENGYKNLKEIFEALQFEKDPTEIYKKLKDKIEDNQTIIYLIKYKSGNSLNISAEAMIKFIPYFKDGYTTDEIKEKLKLNRSEDYSEFKKGIKYLHINQFEKDNNNLKITNHPVKYVVSATLRVVKHLHNVYGSFDEIRVESTRELSQNEETKKAIEKANRELEKQIDTIVQNNEYQIIAKQYGKNLQKYARKILMYESQDRRDIYTGKGIEFKDIFTNTVDLDHIVPQSLGGLSVKHNFVLVHKDTNIQKSNQLPLNFVKDKEDFINRVEYLFAEHKINWKMKKNLLSNSLEETYKDTFESKSLRATSYIEALTAQVLKRYYPFKDIKKQKDGSSVRHIQGRATSNIRKILKVKTKIRDTNIHHAIDAILIGMTNQSWLKKLSDTFKNNMGVIDDKARANIKKDIPIFEIIINNEVKYLEPKELVNLIEDNYNFDGENSIFYKDIWGKTKSINFWVSKKPMVSKIHKDTIYSKKDNGIYTVRESIINHFINLKITPTTLSKKFEEEFNKKILNKMYLYKTNPNDIIYKIVQQRANDIKVLLDSFMLEDTKDKETLSILKTNLDNLIHSDLLDNNNNIIKKVKFYQTNLTGFNVRGGLATKEKTFIGFKATLENDKLNYTRIDVANIDKIKKDNDNSFKVYKNDLVFFVYPDKSYKGGKIVSFLEDKKIGAFQNPRFPATIQFQPFNFCKLGSGKKVGTKQQALAQTIGIIKLNLDILGNIKSYQKIGQCNSDILEHIKTIKG

SEQ ID NO: 3471 - RNA, 43 nt, Artificial Sequence
  Description of Artificial Sequence: Synthetic oligonucleotide
  Category: MG11 effectors crRNA
  Description: MG11-1 effector crRNA
  modified_base (20)..(43): a, c, u, g, unknown or other
gaauaccugcuaaugcaggnnnnnnnnnnnnnnnnnnnnnnnn

SEQ ID NO: 3472 - DNA, 31 bp, Unknown
  Description of Unknown: uncultivated organism sequence
  Category: MG11 effectors repeat
  Description: MG11-1 effector repeat
gtaacattacacgaatacctgctaatgcagg

SEQ ID NO: 3473 - DNA, 31 bp, Unknown; identical to SEQ ID NO: 3472
  Description of Unknown: uncultivated organism sequence
  Category: MG11 effectors repeat
  Description: MG11-1 effector repeat

SEQ ID NO: 3474 - DNA, 31 bp, Unknown; identical to SEQ ID NO: 3472
  Description of Unknown: uncultivated organism sequence
  Category: MG11 effectors repeat
  Description: MG11-1 effector repeat

SEQ ID NO: 3475 - DNA, 25 bp, Unknown
  Description of Unknown: uncultivated organism sequence
  Category: MG11 effectors repeat
  Description: MG11-2 effector repeat
aaaatagaatttctacttgtgtaga

SEQ ID NO: 3476 - DNA, 25 bp, Unknown
  Description of Unknown: uncultivated organism sequence
  Category: MG11 effectors repeat
  Description: MG11-2 effector repeat
aaaatagaatttctacttgtgtaga

SEQ ID NO: 3477 - DNA, 25 bp, Unknown
  Description of Unknown: uncultivated organism sequence
  Category: MG11 effectors repeat
  Description: MG11-2 effector repeat
aaaatagaatttctacttgtgtaga

SEQ ID NO: 3478 - DNA, 25 bp, Unknown
  Description of Unknown: uncultivated organism sequence
  Category: MG11 effectors repeat
  Description: MG11-2 effector repeat
aaaatagaatttctacttgtgtaga

SEQ ID NO: 3479 - DNA, 25 bp, Unknown
  Description of Unknown: uncultivated organism sequence
  Category: MG11 effectors repeat
  Description: MG11-2 effector repeat
aaaatagaatttctacttgtgtaga

SEQ ID NO: 3480 - DNA, 25 bp, Unknown
  Description of Unknown: uncultivated organism sequence
  Category: MG11 effectors repeat
  Description: MG11-2 effector repeat
aaaatagaatttctacttgtgtaga

SEQ ID NO: 3481 - DNA, 25 bp, Unknown
  Description of Unknown: uncultivated organism sequence
  Category: MG11 effectors repeat
  Description: MG11-2 effector repeat
aaaatagaatttctacttgtgtaga

SEQ ID NO: 3482 - DNA, 25 bp, Unknown
  Description of Unknown: uncultivated organism sequence
  Category: MG11 effectors repeat
  Description: MG11-2 effector repeat
aaaatagaatttctacttgtgtaga

SEQ ID NO: 3483 - DNA, 25 bp, Unknown
  Description of Unknown: uncultivated organism sequence
  Category: MG11 effectors repeat
  Description: MG11-2 effector repeat
aaaatagaatttctacttgtgtaga

SEQ ID NO: 3484 - DNA, 25 bp, Unknown
  Description of Unknown: uncultivated organism sequence
  Category: MG11 effectors repeat
  Description: MG11-2 effector repeat
aaaatagaatttctacttgtgtaga

SEQ ID NO: 3485 - DNA, 25 bp, Unknown
  Description of Unknown: uncultivated organism sequence
  Category: MG11 effectors repeat
  Description: MG11-2 effector repeat
aaaatagaatttctacttgtgtaga

SEQ ID NO: 3486 - DNA, 25 bp, Unknown
  Description of Unknown: uncultivated organism sequence
  Category: MG11 effectors repeat
  Description: MG11-2 effector repeat
aaaatagaatttctacttgtgtaga

SEQ ID NO: 3487 - DNA, 37 bp, Unknown
  Description of Unknown: uncultivated organism sequence
  Category: MG11 effectors repeat
  Description: MG11-3 effector repeat
ggctataaggccatattaatttctactattcgtagat

SEQ ID NO: 3488 - DNA, 37 bp, Unknown; identical to SEQ ID NO: 3487
  Description of Unknown: uncultivated organism sequence
  Category: MG11 effectors repeat
  Description: MG11-3 effector repeat

SEQ ID NO: 3489 - DNA, 37 bp, Unknown; identical to SEQ ID NO: 3487
  Description of Unknown: uncultivated organism sequence
  Category: MG11 effectors repeat
  Description: MG11-3 effector repeat

SEQ ID NO: 3490 - DNA, 37 bp, Unknown; identical to SEQ ID NO: 3487
  Description of Unknown: uncultivated organism sequence
  Category: MG11 effectors repeat
  Description: MG11-3 effector repeat

SEQ ID NO: 3491 - DNA, 36 bp, Unknown
  Description of Unknown: uncultivated organism sequence
  Category: MG11 effectors repeat
  Description: MG11-5 effector repeat
ggtgtaaaaccatatcaaatttctactaatgtagat

SEQ ID NO: 3492 - DNA, 36 bp, Unknown; identical to SEQ ID NO: 3491
  Description of Unknown: uncultivated organism sequence
  Category: MG11 effectors repeat
  Description: MG11-5 effector repeat

SEQ ID NO: 3493 - DNA, 36 bp, Unknown; identical to SEQ ID NO: 3491
  Description of Unknown: uncultivated organism sequence
  Category: MG11 effectors repeat
  Description: MG11-5 effector repeat

SEQ ID NO: 3494 - DNA, 36 bp, Unknown
  Description of Unknown: uncultivated organism sequence
  Category: MG11 effectors repeat
  Description: MG11-6 effector repeat
ggtgtaagaccactgaaaatttctacttgtgtagat

SEQ ID NO: 3495 - DNA, 36 bp, Unknown
  Description of Unknown: uncultivated organism sequence
  Category: MG11 effectors repeat
  Description: MG11-7 effector repeat
ggctataaagccattttaatttctactattgtagat

SEQ ID NO: 3496 - DNA, 36 bp, Unknown; identical to SEQ ID NO: 3495
  Description of Unknown: uncultivated organism sequence
  Category: MG11 effectors repeat
  Description: MG11-7 effector repeat

SEQ ID NO: 3497 - DNA, 20 bp, Unknown
  Description of Unknown: uncultivated organism sequence
  Category: MG11 effectors repeat
  Description: MG11-8 effector repeat
aaatatctacttctgtagat

SEQ ID NO: 3498 - DNA, 20 bp, Unknown
  Description of Unknown: uncultivated organism sequence
  Category: MG11 effectors repeat
  Description: MG11-8 effector repeat
aaatatctacttctgtagat

SEQ ID NO: 3499 - DNA, 32 bp, Unknown
  Description of Unknown: uncultivated organism sequence
  Category: MG11 effectors repeat
  Description: MG11-10 effector repeat
gcaacattacatgaatacctgctaatgcaggc

SEQ ID NO: 3500 - DNA, 32 bp, Unknown; identical to SEQ ID NO: 3499
  Description of Unknown: uncultivated organism sequence
  Category: MG11 effectors repeat
  Description: MG11-10 effector repeat

SEQ ID NO: 3501 - DNA, 32 bp, Unknown; identical to SEQ ID NO: 3499
  Description of Unknown: uncultivated organism sequence
  Category: MG11 effectors repeat
  Description: MG11-10 effector repeat

SEQ ID NO: 3502 - DNA, 32 bp, Unknown; identical to SEQ ID NO: 3499
  Description of Unknown: uncultivated organism sequence
  Category: MG11 effectors repeat
  Description: MG11-10 effector repeat

SEQ ID NO: 3503 - DNA, 32 bp, Unknown; identical to SEQ ID NO: 3499
  Description of Unknown: uncultivated organism sequence
  Category: MG11 effectors repeat
  Description: MG11-10 effector repeat

SEQ ID NO: 3504 - DNA, 32 bp, Unknown; identical to SEQ ID NO: 3499
  Description of Unknown: uncultivated organism sequence
  Category: MG11 effectors repeat
  Description: MG11-10 effector repeat

SEQ ID NO: 3505 - DNA, 20 bp, Unknown
  Description of Unknown: uncultivated organism sequence
  Category: MG11 effectors repeat
  Description: MG11-11 effector repeat
gaatacctgctaatgcaggc

SEQ ID NO: 3506 - DNA, 20 bp, Unknown
  Description of Unknown: uncultivated organism sequence
  Category: MG11 effectors repeat
  Description: MG11-11 effector repeat
gaatacctgctaatgcaggc

SEQ ID NO: 3507 - DNA, 20 bp, Unknown
  Description of Unknown: uncultivated organism sequence
  Category: MG11 effectors repeat
  Description: MG11-12 effector repeat
aaatacctgctaatgcaggc

SEQ ID NO: 3508 - DNA, 20 bp, Unknown
  Description of Unknown: uncultivated organism sequence
  Category: MG11 effectors repeat
  Description: MG11-12 effector repeat
aaatacctgctaatgcaggc

SEQ ID NO: 3509 - DNA, 20 bp, Unknown
  Description of Unknown: uncultivated organism sequence
  Category: MG11 effectors repeat
  Description: MG11-12 effector repeat
aaatacctgctaatgcaggc

SEQ ID NO: 3510 - DNA, 20 bp, Unknown
  Description of Unknown: uncultivated organism sequence
  Category: MG11 effectors repeat
  Description: MG11-12 effector repeat
aaatacctgctaatgcaggc

SEQ ID NO: 3511 - DNA, 20 bp, Unknown
  Description of Unknown: uncultivated organism sequence
  Category: MG11 effectors repeat
  Description: MG11-12 effector repeat
aaatacctgctaatgcaggc

SEQ ID NO: 3512 - DNA, 20 bp, Unknown
  Description of Unknown: uncultivated organism sequence
  Category: MG11 effectors repeat
  Description: MG11-12 effector repeat
aaatacctgctaatgcaggc

SEQ ID NO: 3513 - DNA, 20 bp, Unknown
  Description of Unknown: uncultivated organism sequence
  Category: MG11 effectors repeat
  Description: MG11-12 effector repeat
aaatacctgctaatgcaggc

SEQ ID NO: 3514 - DNA, 20 bp, Unknown
  Description of Unknown: uncultivated organism sequence
  Category: MG11 effectors repeat
  Description: MG11-12 effector repeat
aaatacctgctaatgcaggc

SEQ ID NO: 3515 - DNA, 20 bp, Unknown
  Description of Unknown: uncultivated organism sequence
  Category: MG11 effectors repeat
  Description: MG11-12 effector repeat
aaatacctgctaatgcaggc

SEQ ID NO: 3516 - DNA, 20 bp, Unknown
  Description of Unknown: uncultivated organism sequence
  Category: MG11 effectors repeat
  Description: MG11-12 effector repeat
aaatacctgctaatgcaggc

SEQ ID NO: 3517 - DNA, 20 bp, Unknown
  Description of Unknown: uncultivated organism sequence
  Category: MG11 effectors repeat
  Description: MG11-12 effector repeat
aaatacctgctaatgcaggc

SEQ ID NO: 3518 - DNA, 20 bp, Unknown
  Description of Unknown: uncultivated organism sequence
  Category: MG11 effectors repeat
  Description: MG11-12 effector repeat
aaatacctgctaatgcaggc

SEQ ID NO: 3519 - DNA, 20 bp, Unknown
  Description of Unknown: uncultivated organism sequence
  Category: MG11 effectors repeat
  Description: MG11-12 effector repeat
aaatacctgctaatgcaggc

SEQ ID NO: 3520 - DNA, 20 bp, Unknown
  Description of Unknown: uncultivated organism sequence
  Category: MG11 effectors repeat
  Description: MG11-12 effector repeat
aaatacctgctaatgcaggc

SEQ ID NO: 3521 - DNA, 37 bp, Unknown
  Description of Unknown: uncultivated organism sequence
  Category: MG11 effectors repeat
  Description: MG11-13 effector repeat
ggctataagaccatattaatttctactattcgtagac

SEQ ID NO: 3522 - DNA, 37 bp, Unknown; identical to SEQ ID NO: 3521
  Description of Unknown: uncultivated organism sequence
  Category: MG11 effectors repeat
  Description: MG11-13 effector repeat

SEQ ID NO: 3523 - DNA, 37 bp, Unknown
  Description of Unknown: uncultivated organism sequence
  Category: MG11 effectors repeat
  Description: MG11-14 effector repeat
ggctataaggccatattaatttctactattcgtagac

SEQ ID NO: 3524 - DNA, 37 bp, Unknown; identical to SEQ ID NO: 3523
  Description of Unknown: uncultivated organism sequence
  Category: MG11 effectors repeat
  Description: MG11-14 effector repeat

SEQ ID NO: 3525 - DNA, 36 bp, Unknown
  Description of Unknown: uncultivated organism sequence
  Category: MG11 effectors repeat
  Description: MG11-15 effector repeat
ggctatatgccaatataatttctactttacgtagat

SEQ ID NO: 3526 - DNA, 36 bp, Unknown
  Description of Unknown: uncultivated organism sequence
  Category: MG11 effectors repeat
  Description: MG11-16 effector repeat
ggctataaaccggtataatttctactattcgtagat

SEQ ID NO: 3527 - DNA, 36 bp, Unknown; identical to SEQ ID NO: 3526
  Description of Unknown: uncultivated organism sequence
  Category: MG11 effectors repeat
  Description: MG11-16 effector repeat

SEQ ID NO: 3528 - DNA, 36 bp, Unknown; identical to SEQ ID NO: 3526
  Description of Unknown: uncultivated organism sequence
  Category: MG11 effectors repeat
  Description: MG11-16 effector repeat

SEQ ID NO: 3529 - DNA, 35 bp, Unknown
  Description of Unknown: uncultivated organism sequence
  Category: MG11 effectors repeat
  Description: MG11-17 effector repeat
gtttataagtaatatttaatttctactttcgtaga

SEQ ID NO: 3530 - DNA, 35 bp, Unknown; identical to SEQ ID NO: 3529
  Description of Unknown: uncultivated organism sequence
  Category: MG11 effectors repeat
  Description: MG11-17 effector repeat

SEQ ID NO: 3531 - DNA, 35 bp, Unknown; identical to SEQ ID NO: 3529
  Description of Unknown: uncultivated organism sequence
  Category: MG11 effectors repeat
  Description: MG11-17 effector repeat

SEQ ID NO: 3532 - DNA, 35 bp, Unknown; identical to SEQ ID NO: 3529
  Description of Unknown: uncultivated organism sequence
  Category: MG11 effectors repeat
  Description: MG11-17 effector repeat

SEQ ID NO: 3533 - DNA, 35 bp, Unknown; identical to SEQ ID NO: 3529
  Description of Unknown: uncultivated organism sequence
  Category: MG11 effectors repeat
  Description: MG11-17 effector repeat

SEQ ID NO: 3534 - DNA, 35 bp, Unknown; identical to SEQ ID NO: 3529
  Description of Unknown: uncultivated organism sequence
  Category: MG11 effectors repeat
  Description: MG11-17 effector repeat

SEQ ID NO: 3535 - DNA, 35 bp, Unknown; identical to SEQ ID NO: 3529
  Description of Unknown: uncultivated organism sequence
  Category: MG11 effectors repeat
  Description: MG11-17 effector repeat

SEQ ID NO: 3536 - DNA, 35 bp, Unknown; identical to SEQ ID NO: 3529
  Description of Unknown: uncultivated organism sequence
  Category: MG11 effectors repeat
  Description: MG11-17 effector repeat

SEQ ID NO: 3537 - DNA, 35 bp, Unknown; identical to SEQ ID NO: 3529
  Description of Unknown: uncultivated organism sequence
  Category: MG11 effectors repeat
  Description: MG11-17 effector repeat

SEQ ID NO: 3538 - DNA, 35 bp, Unknown; identical to SEQ ID NO: 3529
  Description of Unknown: uncultivated organism sequence
  Category: MG11 effectors repeat
  Description: MG11-17 effector repeat

SEQ ID NO: 3539 - skipped

SEQ ID NO: 3540 - DNA, 36 bp, Unknown
  Description of Unknown: uncultivated organism sequence
  Category: MG13 effectors repeat
  Description: MG13-1 effector repeat
ggctataaagcctatttaatttctactgttgtagat

SEQ ID NO: 3541 - DNA, 36 bp, Unknown
  Description of Unknown: uncultivated organism sequence
  Category: MG13 effectors repeat
  Description: MG13-3 effector repeat
gactataaatcctatttaatttctactattgtagat

SEQ ID NO: 3542 - DNA, 36 bp, Unknown; identical to SEQ ID NO: 3541
  Description of Unknown: uncultivated organism sequence
  Category: MG13 effectors repeat
  Description: MG13-3 effector repeat

SEQ ID NO: 3543 - DNA, 36 bp, Unknown; identical to SEQ ID NO: 3541
  Description of Unknown: uncultivated organism sequence
  Category: MG13 effectors repeat
  Description: MG13-4 effector repeat

SEQ ID NO: 3544 - DNA, 36 bp, Unknown; identical to SEQ ID NO: 3541
  Description of Unknown: uncultivated organism sequence
  Category: MG13 effectors repeat
  Description: MG13-4 effector repeat

SEQ ID NO: 3545 - DNA, 36 bp, Unknown
  Description of Unknown: uncultivated organism sequence
  Category: MG13 effectors repeat
  Description: MG13-6 effector repeat
gtctatagatataaagtaatttctactgttgtagat

SEQ ID NO: 3546 - DNA, 36 bp, Unknown
  Description of Unknown: uncultivated organism sequence
  Category: MG13 effectors repeat
  Description: MG13-7 effector repeat
gcctataagggccattaaatttctactgttgtagat

SEQ ID NO: 3547 - DNA, 36 bp, Unknown; identical to SEQ ID NO: 3546
  Description of Unknown: uncultivated organism sequence
  Category: MG13 effectors repeat
  Description: MG13-7 effector repeat

SEQ ID NO: 3548 - DNA, 36 bp, Unknown; identical to SEQ ID NO: 3546
  Description of Unknown: uncultivated organism sequence
  Category: MG13 effectors repeat
  Description: MG13-7 effector repeat

SEQ ID NO: 3549 - DNA, 36 bp, Unknown; identical to SEQ ID NO: 3546
  Description of Unknown: uncultivated organism sequence
  Category: MG13 effectors repeat
  Description: MG13-7 effector repeat

SEQ ID NO: 3550 - DNA, 36 bp, Unknown
  Description of Unknown: uncultivated organism sequence
  Category: MG13 effectors repeat
  Description: MG13-8 effector repeat
gtctgtaagactaatataatttctactattgtagat

SEQ ID NO: 3551 - DNA, 45 bp, Unknown
  Description of Unknown: uncultivated organism sequence
  Category: MG19 Guide RNA
  Description: MG19-2 dual guide RNA1
  modified_base (26)..(45): a, c, t, g, unknown or other
caccgaaagttagggacaaaaaggcnnnnnnnnnnnnnnnnnnnn

SEQ ID NO: 3552 - DNA, 96 bp, Unknown
  Description of Unknown: uncultivated organism sequence
  Category: MG19 Guide RNA
  Description: MG19-2 dual guide RNA2
gggtccctaacccaatgcgctcaagcggttttccctcttgataataatcaagagattgccttttcgacttttagtcgttactgcttgagcgcgcaa

SEQ ID NO: 3553 - DNA, 45 bp, Unknown
  Description of Unknown: uncultivated organism sequence
  Category: MG19 Guide RNA
  Description: MG19-3 dual guide RNA1
  modified_base (26)..(45): a, c, t, g, unknown or other
catcgaaagttagggactaaaaggcnnnnnnnnnnnnnnnnnnnn

SEQ ID NO: 3554 - DNA, 79 bp, Unknown
  Description of Unknown: uncultivated organism sequence
  Category: MG19 Guide RNA
  Description: MG19-3 dual guide RNA2
gagttcctaactcaagcgcctttgcgctttcccgttaacgaaagttaacgatgccttttagtgcagaggcgcaattttt

SEQ ID NO: 3555 - DNA, 45 bp, Unknown
  Description of Unknown: uncultivated organism sequence
  Category: MG19 Guide RNA
  Description: MG19-4 dual guide RNA1
  modified_base (26)..(45): a, c, t, g, unknown or other
catcgaaagttaggaaccaaaaggcnnnnnnnnnnnnnnnnnnnn

SEQ ID NO: 3556 - DNA, 101 bp, Unknown
  Description of Unknown: uncultivated organism sequence
  Category: MG19 Guide RNA
  Description: MG19-4 dual guide RNA2
gggttcctaaccttagcgctcttgcgctttccccaaccgaaaggttggttgcctttccctttttgggttcccaaaaggaacagtgcaagggcgcgcaattt

SEQ ID NO: 3557 - DNA, 45 bp, Unknown
  Description of Unknown: uncultivated organism sequence
  Category: MG19 Guide RNA
  Description: MG19-5 dual guide RNA1
  modified_base (26)..(45): a, c, t, g, unknown or other
catcgaatattaggaaccaaaaggcnnnnnnnnnnnnnnnnnnnn

SEQ ID NO: 3558 - DNA, 81 bp, Unknown
  Description of Unknown: uncultivated organism sequence
  Category: MG19 Guide RNA
  Description: MG19-5 dual guide RNA1
gggttcctaatatctatgcgcccttgcgctttccacttcataataaaatgaagtttgccttgtagtgcaagggcgcttttt

SEQ ID NO: 3559 - DNA, 127 bp, Unknown
  Description of Unknown: uncultivated organism sequence
  Category: MG20 Guide RNA
  Description: MG20-1 sgRNA
  modified_base (108)..(127): a, c, t, g, unknown or other
atcgtgcttttagtattttctttgagcactcgaaacagaaaggaaaacccaactgtttcacgaatctttgacaacttggaagaaattctaagaaggattcatcaaagnnnnnnnnnnnnnnnnnnnn

SEQ ID NO: 3560 - DNA, 36 bp, Unknown
  Description of Unknown: uncultivated organism sequence
  Category: MG26 effectors repeat
  Description: MG26-1 effector repeat
ctcgaaaaccaatatcgaatttctacttttgtagat

SEQ ID NO: 3561 - DNA, 36 bp, Unknown
  Description of Unknown: uncultivated organism sequence
  Category: MG26 effectors repeat
  Description: MG26-5 effector repeat
atttaaacataatatctaatctctacttttgtagat

SEQ ID NO: 3562 - DNA, 36 bp, Unknown; identical to SEQ ID NO: 3561
  Description of Unknown: uncultivated organism sequence
  Category: MG26 effectors repeat
  Description: MG26-5 effector repeat

SEQ ID NO: 3563 - DNA, 36 bp, Unknown; identical to SEQ ID NO: 3561
  Description of Unknown: uncultivated organism sequence
  Category: MG26 effectors repeat
  Description: MG26-5 effector repeat

SEQ ID NO: 3564 - DNA, 36 bp, Unknown; identical to SEQ ID NO: 3561
  Description of Unknown: uncultivated organism sequence
  Category: MG26 effectors repeat
  Description: MG26-5 effector repeat

SEQ ID NO: 3565 - DNA, 36 bp, Unknown
  Description of Unknown: uncultivated organism sequence
  Category: MG26 effectors repeat
  Description: MG26-12 effector repeat
ctctaaacctcatataaaatttctacttttgtagat

SEQ ID NO: 3566 - DNA, 37 bp, Unknown
  Description of Unknown: uncultivated organism sequence
  Category: MG26 effectors repeat
  Description: MG26-14 effector repeat
agtttaaacataatattaaatttctactttggtagat

SEQ ID NO: 3567 - DNA, 37 bp, Unknown; identical to SEQ ID NO: 3566
  Description of Unknown: uncultivated organism sequence
  Category: MG26 effectors repeat
  Description: MG26-14 effector repeat

SEQ ID NO: 3568 - DNA, 37 bp, Unknown; identical to SEQ ID NO: 3566
  Description of Unknown: uncultivated organism sequence
  Category: MG26 effectors repeat
  Description: MG26-14 effector repeat

SEQ ID NO: 3569 - DNA, 37 bp, Unknown; identical to SEQ ID NO: 3566
  Description of Unknown: uncultivated organism sequence
  Category: MG26 effectors repeat
  Description: MG26-14 effector repeat

SEQ ID NO: 3570 - DNA, 37 bp, Unknown; identical to SEQ ID NO: 3566
  Description of Unknown: uncultivated organism sequence
  Category: MG26 effectors repeat
  Description: MG26-14 effector repeat

SEQ ID NO: 3571 - DNA, 36 bp, Unknown
  Description of Unknown: uncultivated organism sequence
  Category: MG26 effectors repeat
  Description: MG26-16 effector repeat
ctctaaaacccccatctgatttctacttttgtagat

SEQ ID NO: 3572 - DNA, 36 bp, Unknown; identical to SEQ ID NO: 3571
  Description of Unknown: uncultivated organism sequence
  Category: MG26 effectors repeat
  Description: MG26-16 effector repeat

SEQ ID NO: 3573 - DNA, 36 bp, Unknown
  Description of Unknown: uncultivated organism sequence
  Category: MG28 effectors repeat
  Description: MG28-1 effector repeat
gtctataaagacaattaaatttctactatgtagatc

SEQ ID NO: 3574 - DNA, 36 bp, Unknown; identical to SEQ ID NO: 3573
  Description of Unknown: uncultivated organism sequence
  Category: MG28 effectors repeat
  Description: MG28-1 effector repeat

SEQ ID NO: 3575 - DNA, 36 bp, Unknown
  Description of Unknown: uncultivated organism sequence
  Category: MG28 effectors repeat
  Description: MG28-5 effector repeat
ggtgttagaccatacaaaatttctactattgtagat

SEQ ID NO: 3576 - DNA, 36 bp, Unknown
  Description of Unknown: uncultivated organism sequence
  Category: MG28 effectors repeat
  Description: MG28-7 effector repeat
ggctataatgcctatataatttctactattgtagat

SEQ ID NO: 3577 - DNA, 36 bp, Unknown
  Description of Unknown: uncultivated organism sequence
  Category: MG28 effectors repeat
  Description: MG28-8 effector repeat
ggctataatgcctatataatttctactattgtagac

SEQ ID NO: 3578 - DNA, 36 bp, Unknown; identical to SEQ ID NO: 3577
  Description of Unknown: uncultivated organism sequence
  Category: MG28 effectors repeat
  Description: MG28-8 effector repeat

SEQ ID NO: 3579 - DNA, 26 bp, Unknown
  Description of Unknown: uncultivated organism sequence
  Category: MG28 effectors repeat
  Description: MG28-10 effector repeat
catataaaatttctactattgtagat

SEQ ID NO: 3580 - DNA, 26 bp, Unknown
  Description of Unknown: uncultivated organism sequence
  Category: MG28 effectors repeat
  Description: MG28-10 effector repeat
catataaaatttctactattgtagat

SEQ ID NO: 3581 - DNA, 26 bp, Unknown
  Description of Unknown: uncultivated organism sequence
  Category: MG28 effectors repeat
  Description: MG28-10 effector repeat
catataaaatttctactattgtagat

SEQ ID NO: 3582 - DNA, 26 bp, Unknown
  Description of Unknown: uncultivated organism sequence
  Category: MG28 effectors repeat
  Description: MG28-10 effector repeat
catataaaatttctactattgtagat

SEQ ID NO: 3583 - DNA, 26 bp, Unknown
  Description of Unknown: uncultivated organism sequence
  Category: MG28 effectors repeat
  Description: MG28-10 effector repeat
catataaaatttctactattgtagat

SEQ ID NO: 3584 - DNA, 26 bp, Unknown
  Description of Unknown: uncultivated organism sequence
  Category: MG28 effectors repeat
  Description: MG28-11 effector repeat
catataaaatttctactattgtagat

SEQ ID NO: 3585 - DNA, 26 bp, Unknown
  Description of Unknown: uncultivated organism sequence
  Category: MG28 effectors repeat
  Description: MG28-11 effector repeat
catataaaatttctactattgtagat

SEQ ID NO: 3586 - DNA, 26 bp, Unknown
  Description of Unknown: uncultivated organism sequence
  Category: MG28 effectors repeat
  Description: MG28-11 effector repeat
catataaaatttctactattgtagat

SEQ ID NO: 3587 - DNA, 26 bp, Unknown
  Description of Unknown: uncultivated organism sequence
  Category: MG28 effectors repeat
  Description: MG28-11 effector repeat
catataaaatttctactattgtagat

SEQ ID NO: 3588 - DNA, 26 bp, Unknown
  Description of Unknown: uncultivated organism sequence
  Category: MG28 effectors repeat
  Description: MG28-11 effector repeat
catataaaatttctactattgtagat

SEQ ID NO: 3589 - DNA, 36 bp, Unknown
  Description of Unknown: uncultivated organism sequence
  Category: MG28 effectors repeat
  Description: MG28-12 effector repeat
gatgtaaaactacacataatttctactattgtagat

SEQ ID NO: 3590 - DNA, 36 bp, Unknown; identical to SEQ ID NO: 3589
  Description of Unknown: uncultivated organism sequence
  Category: MG28 effectors repeat
  Description: MG28-12 effector repeat

SEQ ID NO: 3591 - DNA, 36 bp, Unknown; identical to SEQ ID NO: 3589
  Description of Unknown: uncultivated organism sequence
  Category: MG28 effectors repeat
  Description: MG28-12 effector repeat

SEQ ID NO: 3592 - DNA, 36 bp, Unknown; identical to SEQ ID NO: 3589
  Description of Unknown: uncultivated organism sequence
  Category: MG28 effectors repeat
  Description: MG28-12 effector repeat

SEQ ID NO: 3593 - DNA, 36 bp, Unknown
  Description of Unknown: uncultivated organism sequence
  Category: MG28 effectors repeat
  Description: MG28-13 effector repeat
ggctataactcctcaataatttctactatcgtagat

SEQ ID NO: 3594 - DNA, 36 bp, Unknown; identical to SEQ ID NO: 3593
  Description of Unknown: uncultivated organism sequence
  Category: MG28 effectors repeat
  Description: MG28-13 effector repeat

SEQ ID NO: 3595 - DNA, 36 bp, Unknown
  Description of Unknown: uncultivated organism sequence
  Category: MG28 effectors repeat
  Description: MG28-14 effector repeat
ggctataactcctcaataatttctactattgtagat

SEQ ID NO: 3596 - DNA, 36 bp, Unknown
  Description of Unknown: uncultivated organism sequence
  Category: MG28 effectors repeat
  Description: MG28-17 effector repeat
gtctaacagacatttataatttctactattgtagat

SEQ ID NO: 3597 - DNA, 36 bp, Unknown
  Description of Unknown: uncultivated organism sequence
  Category: MG28 effectors repeat
  Description: MG28-19 effector repeat
ggctataagccaaacaaatttctactaagtgtagat

SEQ ID NO: 3598 - DNA, 36 bp, Unknown
  Description of Unknown: uncultivated organism sequence
  Category: MG28 effectors repeat
  Description: MG28-20 effector repeat
ggtgtaaaagcatacaaaatatctactattgtagat

SEQ ID NO: 3599 - DNA, 36 bp, Unknown; identical to SEQ ID NO: 3598
  Description of Unknown: uncultivated organism sequence
  Category: MG28 effectors repeat
  Description: MG28-20 effector repeat

SEQ ID NO: 3600 - DNA, 36 bp, Unknown
  Description of Unknown: uncultivated organism sequence
  Category: MG28 effectors repeat
  Description: MG28-22 effector repeat
ggctataaaccaaacaaatttctactaaatgtagat

SEQ ID NO: 3601 - DNA, 36 bp, Unknown; identical to SEQ ID NO: 3600
  Description of Unknown: uncultivated organism sequence
  Category: MG28 effectors repeat
  Description: MG28-22 effector repeat

SEQ ID NO: 3602 - DNA, 36 bp, Unknown; identical to SEQ ID NO: 3600
  Description of Unknown: uncultivated organism sequence
  Category: MG28 effectors repeat
  Description: MG28-22 effector repeat

SEQ ID NO: 3603 - DNA, 36 bp, Unknown
  Description of Unknown: uncultivated organism sequence
  Category: MG28 effectors repeat
  Description: MG28-23 effector repeat
cgtgtttagatatacagaatttctactattgtagat

SEQ ID NO: 3604 - DNA, 36 bp, Unknown
  Description of Unknown: uncultivated organism sequence
  Category: MG28 effectors repeat
  Description: MG28-24 effector repeat
gtctatagaacccttttaatttctactattgtagat

SEQ ID NO: 3605 - DNA, 28 bp, Unknown
  Description of Unknown: uncultivated organism sequence
  Category: MG28 effectors repeat
  Description: MG28-25 effector repeat
ataagatttaatatctactattgtagat

SEQ ID NO: 3606 - DNA, 28 bp, Unknown
  Description of Unknown: uncultivated organism sequence
  Category: MG28 effectors repeat
  Description: MG28-25 effector repeat
ataagatttaatatctactattgtagat

SEQ ID NO: 3607 - DNA, 28 bp, Unknown
  Description of Unknown: uncultivated organism sequence
  Category: MG28 effectors repeat
  Description: MG28-25 effector repeat
ataagatttaatatctactattgtagat

SEQ ID NO: 3608 - RNA, 43 nt, Artificial Sequence
  Description of Artificial Sequence: Synthetic oligonucleotide
  Category: MG28 effectors, MG30 active effectors crRNA sequence
  Description: MG28-1, MG30-1 crRNA sequence
  modified_base (20)..(43): a, c, u, g, unknown or other
aauuucuacuauuguagaunnnnnnnnnnnnnnnnnnnnnnnn

SEQ ID NO: 3609 - RNA, 44 nt, Unknown
  Description of Unknown: MG28, MG29, MG30, MG31 crRNA sequence
  Category: MG28, MG29, MG30, MG31 crRNA sequence
  Description: MG28, MG29, MG30, MG31 crRNA sequence example 8
  modified_base (21)..(44): a, c, u, g, unknown or other
uaauuucuacuguuguagaunnnnnnnnnnnnnnnnnnnnnnnn

SEQ ID NO: 3610 - DNA, 36 bp, Unknown
  Description of Unknown: uncultivated organism sequence
  Category: MG29 effectors repeat
  Description: MG29-1 effector repeat
gtctaagaccttacttaaatttctactgttgtagat

SEQ ID NO: 3611 - DNA, 36 bp, Unknown
  Description of Unknown: uncultivated organism sequence
  Category: MG29 effectors repeat
  Description: MG29-7 effector repeat
gtctaagaccgaccttaaatttctactgttgtagat

SEQ ID NO: 3612 - DNA, 43 bp, Unknown
  Description of Unknown: uncultivated organism sequence
  Category: MG29 Guide RNA
  Description: MG29-5 sgRNA
  modified_base (20)..(43): a, c, t, g, unknown or other
  misc_feature (20)..(43): This region may encompass 20 or 24 nucleotides
aatttctacagttgtagatnnnnnnnnnnnnnnnnnnnnnnnn

SEQ ID NO: 3613 - DNA, 36 bp, Unknown
  Description of Unknown: uncultivated organism sequence
  Category: MG30 effectors repeat
  Description: MG30-1 effector repeat
ctctagggctacccttaaatttctactattgtagat

SEQ ID NO: 3614 - DNA, 36 bp, Unknown; identical to SEQ ID NO: 3613
  Description of Unknown: uncultivated organism sequence
  Category: MG30 effectors repeat
  Description: MG30-1 effector repeat

SEQ ID NO: 3615 - DNA, 36 bp, Unknown; identical to SEQ ID NO: 3613
  Description of Unknown: uncultivated organism sequence
  Category: MG30 effectors repeat
  Description: MG30-1 effector repeat

SEQ ID NO: 3616 - DNA, 36 bp, Unknown
  Description of Unknown: uncultivated organism sequence
  Category: MG31 effectors repeat
  Description: MG31-1 effector repeat
gtttaagacaaatacaaaatttctactgttgtagat

SEQ ID NO: 3617 - DNA, 29 bp, Unknown
  Description of Unknown: uncultivated organism sequence
  Category: MG31 effectors repeat
  Description: MG31-5 effector repeat
actgatatagaatttctactgttgtagat

SEQ ID NO: 3618 - DNA, 29 bp, Unknown
  Description of Unknown: uncultivated organism sequence
  Category: MG31 effectors repeat
  Description: MG31-5 effector repeat
actgatatagaatttctactgttgtagat

SEQ ID NO: 3619 - DNA, 29 bp, Unknown
  Description of Unknown: uncultivated organism sequence
  Category: MG31 effectors repeat
  Description: MG31-5 effector repeat
actgatatagaatttctactgttgtagat

SEQ ID NO: 3620 - DNA, 36 bp, Unknown
  Description of Unknown: uncultivated organism sequence
  Category: MG31 effectors repeat
  Description: MG31-8 effector repeat
cgttaagacaaatacaaaatttctactgtcgtagat

SEQ ID NO: 3621 - DNA, 36 bp, Unknown; identical to SEQ ID NO: 3620
  Description of Unknown: uncultivated organism sequence
  Category: MG31 effectors repeat
  Description: MG31-8 effector repeat

SEQ ID NO: 3622 - DNA, 36 bp, Unknown; identical to SEQ ID NO: 3620
  Description of Unknown: uncultivated organism sequence
  Category: MG31 effectors repeat
  Description: MG31-8 effector repeat

SEQ ID NO: 3623 - DNA, 36 bp, Unknown
  Description of Unknown: uncultivated organism sequence
  Category: MG31 effectors repeat
  Description: MG31-9 effector repeat
gtttcaaagtgaactaaaatttctactgttgtagat

SEQ ID NO: 3624 - DNA, 36 bp, Unknown
  Description of Unknown: uncultivated organism sequence
  Category: MG31 effectors repeat
  Description: MG31-10 effector repeat
gtttgaacttcatactaaatttctactgttgtagat

SEQ ID NO: 3625 - DNA, 20 bp, Unknown
  Description of Unknown: uncultivated organism sequence
  Category: MG31 effectors repeat
  Description: MG31-11 effector repeat
gaatttctactgttgtagat

SEQ ID NO: 3626 - DNA, 20 bp, Unknown
  Description of Unknown: uncultivated organism sequence
  Category: MG31 effectors repeat
  Description: MG31-11 effector repeat
gaatttctactgttgtagat

SEQ ID NO: 3627 - DNA, 36 bp, Unknown
  Description of Unknown: uncultivated organism sequence
  Category: MG31 effectors repeat
  Description: MG31-16 effector repeat
gtttcaaactgaataagaatttctactgttgtagat

SEQ ID NO: 3628 - DNA, 36 bp, Unknown
  Description of Unknown: uncultivated organism sequence
  Category: MG31 effectors repeat
  Description: MG31-17 effector repeat
gtttagaacccaaataaaatttctactgttgtagat

SEQ ID NO: 3629 - DNA, 36 bp, Unknown; identical to SEQ ID NO: 3628
  Description of Unknown: uncultivated organism sequence
  Category: MG31 effectors repeat
  Description: MG31-18 effector repeat

SEQ ID NO: 3630 - DNA, 36 bp, Unknown; identical to SEQ ID NO: 3628
  Description of Unknown: uncultivated organism sequence
  Category: MG31 effectors repeat
  Description: MG31-18 effector repeat

SEQ ID NO: 3631 - DNA, 36 bp, Unknown; identical to SEQ ID NO: 3628
  Description of Unknown: uncultivated organism sequence
  Category: MG31 effectors repeat
  Description: MG31-19 effector repeat

SEQ ID NO: 3632 - DNA, 36 bp, Unknown; identical to SEQ ID NO: 3628
  Description of Unknown: uncultivated organism sequence
  Category: MG31 effectors repeat
  Description: MG31-17, MG31-18, MG31-19 effectors repeat

SEQ ID NO: 3633 - DNA, 36 bp, Unknown
  Description of Unknown: uncultivated organism sequence
  Category: MG32 effectors repeat
  Description: MG32-1 effector repeat
ctttaagagactccttcaatttctactgttgtagat

SEQ ID NO: 3634 - DNA, 36 bp, Unknown; identical to SEQ ID NO: 3633
  Description of Unknown: uncultivated organism sequence
  Category: MG32 effectors repeat
  Description: MG32-1 effector repeat

SEQ ID NO: 3635 - RNA, 36 nt, Artificial Sequence
  Description of Artificial Sequence: Synthetic oligonucleotide
  Category: MG37 effectors repeat
  Description: MG37-1 repeat
ggcgcgcuggccagcgcgcucaugaucgacugacac

SEQ ID NO: 3636 - RNA, 115 nt, Artificial Sequence
  Description of Artificial Sequence: Synthetic polynucleotide
  Category: MG37 sgRNA1
  Description: MG37-1 sgRNA1
  modified_base (92)..(115): a, c, u, g, unknown or other
ucgccuaaagggcgaaaugaucugcguucagugucgucgccuucaaugugcgcaucaccgcagaggucgaucagaaaugaucgacugacacnnnnnnnnnnnnnnnnnnnnnnnn

SEQ ID NO: 3637 - RNA, 93 nt, Artificial Sequence
  Description of Artificial Sequence: Synthetic oligonucleotide
  Category: MG37 sgRNA2
  Description: MG37-1 sgRNA2
  modified_base (70)..(93): a, c, u, g, unknown or other
ucgccuaaagggcgaaaugaucugcguucagugucgucgccuucaaugugcgcaucaccgcagagacacnnnnnnnnnnnnnnnnnnnnnnnn

SEQ ID NO: 3638 - RNA, 73 nt, Artificial Sequence
  Description of Artificial Sequence: Synthetic oligonucleotide
  Category: MG37 tracrRNA
  Description: MG37-1 tracrRNA
ucgccuaaagggcgaaaugaucugcguucagugucgucgccuucaaugugcgcaucaccgcagaggucgauca

SEQ ID NO: 3639 - RNA, 36 nt, Artificial Sequence
  Description of Artificial Sequence: Synthetic oligonucleotide
  Category: MG37 repeat
  Description: MG37-2 repeat
ccagaagcgagcguggcauugcgaggugacggacac

SEQ ID NO: 3640 - RNA, 111 nt, Artificial Sequence
  Description of Artificial Sequence: Synthetic polynucleotide
  Category: MG37 sgRNA1
  Description: MG37-2 sgRNA1
  modified_base (88)..(111): a, c, u, g, unknown or other
uuccucgacaggaggaaacaacgcugcggaacgugucguccccuuuaaugggcuugguaccgcaggucaccgaaaggugacggacacnnnnnnnnnnnnnnnnnnnnnnnn

SEQ ID NO: 3641 - RNA, 95 nt, Artificial Sequence
  Description of Artificial Sequence: Synthetic oligonucleotide
  Category: MG37 sgRNA2
  Description: MG37-2 sgRNA2
  modified_base (72)..(95): a, c, u, g, unknown or other
uuccucgacaggaggaaacaacgcugcggaacgugucguccccuuuaaugggcuugguaccgcagggacacnnnnnnnnnnnnnnnnnnnnnnnn

SEQ ID NO: 3642 - RNA, 71 nt, Artificial Sequence
  Description of Artificial Sequence: Synthetic oligonucleotide
  Category: MG37 tracrRNA
  Description: MG37-2 tracrRNA
uuccucgacaggaggaaacaacgcugcggaacgugucguccccuuuaaugggcuugguaccgcaggucacc

SEQ ID NO: 3643 - RNA, 37 nt, Artificial Sequence
  Description of Artificial Sequence: Synthetic oligonucleotide
  Category: MG37 repeat
  Description: MG37-3 repeat
ccucgccgacggugaaaggaaccagaucugcugacac

SEQ ID NO: 3644 - RNA, 116 nt, Artificial Sequence
  Description of Artificial Sequence: Synthetic polynucleotide
  Category: MG37 sgRNA1
  Description: MG37-3 sgRNA1
  modified_base (93)..(116): a, c, u, g, unknown or other
aauaaaaugguccuacaggggcugaaaucgcgcgggugugucaucggcuucaaugccuuuagcaccgcgagcagaugaaaaucugcugacacnnnnnnnnnnnnnnnnnnnnnnnn

SEQ ID NO: 3645 - RNA, 98 nt, Artificial Sequence
  Description of Artificial Sequence: Synthetic oligonucleotide
  Category: MG37 sgRNA2
  Description: MG37-3 sgRNA2
  modified_base (75)..(98): a, c, u, g, unknown or other
aauaaaaugguccuacaggggcugaaaucgcgcgggugugucaucggcuucaaugccuuuagcaccgcggacacnnnnnnnnnnnnnnnnnnnnnnnn

SEQ ID NO: 3646 - RNA, 76 nt, Artificial Sequence
  Description of Artificial Sequence: Synthetic oligonucleotide
  Category: MG37 tracrRNA
  Description: MG37-3 tracrRNA
aauaaaaugguccuacaggggcugaaaucgcgcgggugugucaucggcuucaaugccuuuagcaccgcgagcagau

SEQ ID NO: 3647 - RNA, 36 nt, Artificial Sequence
  Description of Artificial Sequence: Synthetic oligonucleotide
  Category: MG37 repeat
  Description: MG37-4 repeat
ggcggcgaauucgccggcaucucgaucgaccgacac

SEQ ID NO: 3648 - RNA, 131 nt, Artificial Sequence
  Description of Artificial Sequence: Synthetic polynucleotide
  Category: MG37 sgRNA1
  Description: MG37-4 sgRNA1
  modified_base (108)..(131): a, c, u, g, unknown or other
uauauugaaagcaauccgcuacaggcggagggaacuccgugaacgugucuuccccuucgaugggcuuggcacacggggucaaucgaggaaacucgaucgaccgacacnnnnnnnnnnnnnnnnnnnnnnnn

SEQ ID NO: 3649 - RNA, 105 nt, Artificial Sequence
  Description of Artificial Sequence: Synthetic polynucleotide
  Category: MG37 sgRNA2
  Description: MG37-4 sgRNA2
  modified_base (82)..(105): a, c, u, g, unknown or other
uauauugaaagcaauccgcuacaggcggagggaacuccgugaacgugucuuccccuucgaugggcuuggcacacgggacacnnnnnnnnnnnnnnnnnnnnnnnn

SEQ ID NO: 3650 - RNA, 87 nt, Artificial Sequence
  Description of Artificial Sequence: Synthetic oligonucleotide
  Category: MG37 tracrRNA
  Description: MG37-4 tracrRNA
uauauugaaagcaauccgcuacaggcggagggaacuccgugaacgugucuuccccuucgaugggcuuggcacacggggucaaucgag

SEQ ID NO: 3651 - RNA, 36 nt, Artificial Sequence
  Description of Artificial Sequence: Synthetic oligonucleotide
  Category: MG37 repeat1
  Description: MG37-5 repeat1
guaucaccgguugaagcacaccucauugauggacac

SEQ ID NO: 3652 - RNA, 120 nt, Artificial Sequence
  Description of Artificial Sequence: Synthetic polynucleotide
  Category: MG37 sgRNA1
  Description: MG37-5 sgRNA1
  modified_base (97)..(120): a, c, u, g, unknown or other
uaauaagaagcuccuauagggaguguauuuuuuacggaaugugucuuccuauuaaauuaguuuagcaccguaacauuaaugaaaauugauggacacnnnnnnnnnnnnnnnnnnnnnnnn

SEQ ID NO: 3653 - RNA, 102 nt, Artificial Sequence
  Description of Artificial Sequence: Synthetic polynucleotide
  Category: MG37 sgRNA2
  Description: MG37-5 sgRNA2
  modified_base (79)..(102): a, c, u, g, unknown or other
uaauaagaagcuccuauagggaguguauuuuuuacggaaugugucuuccuauuaaauuaguuuagcaccguaagacacnnnnnnnnnnnnnnnnnnnnnnnn

SEQ ID NO: 3654 - RNA, 80 nt, Artificial Sequence
  Description of Artificial Sequence: Synthetic oligonucleotide
  Category: MG37 tracrRNA1
  Description: MG37-5 tracrRNA1
uaauaagaagcuccuauagggaguguauuuuuuacggaaugugucuuccuauuaaauuaguuuagcaccguaacauuaau

SEQ ID NO: 3655 - RNA, 36 nt, Artificial Sequence
  Description of Artificial Sequence: Synthetic oligonucleotide
  Category: MG37 repeat
  Description: MG37-6 repeat
gucgcaucgcuuccgagaaaccaacgcuguuggcac

SEQ ID NO: 3656 - RNA, 110 nt, Artificial Sequence
  Description of Artificial Sequence: Synthetic polynucleotide
  Category: MG37 sgRNA1
  Description: MG37-6 sgRNA1
  modified_base (87)..(110): a, c, u, g, unknown or other
aaggacgucgaaaucgaugucgcucugugguaugugccuccgucuuaaaugacuuuaagccacaggacagcgaaagcuguuggcacnnnnnnnnnnnnnnnnnnnnnnnn

SEQ ID NO: 3657 - RNA, 94 nt, Artificial Sequence
  Description of Artificial Sequence: Synthetic oligonucleotide
  Category: MG37 sgRNA2
  Description: MG37-6 sgRNA2
  modified_base (71)..(94): a, c, u, g, unknown or other
aaggacgucgaaaucgaugucgcucugugguaugugccuccgucuuaaaugacuuuaagccacagggcacnnnnnnnnnnnnnnnnnnnnnnnn

SEQ ID NO: 3658 - RNA, 71 nt, Artificial Sequence
  Description of Artificial Sequence: Synthetic oligonucleotide
  Category: MG37 tracrRNA
  Description: MG37-6 tracrRNA
aaggacgucgaaaucgaugucgcucugugguaugugccuccgucuuaaaugacuuuaagccacaggacagc

SEQ ID NO: 3659 - RNA, 36 nt, Artificial Sequence
  Description of Artificial Sequence: Synthetic oligonucleotide
  Category: MG37 repeat
  Description: MG37-7 repeat
ggagcaucgagcaacccgaacuucaucuacugacac

SEQ ID NO: 3660 - RNA, 126 nt, Artificial Sequence
  Description of Artificial Sequence: Synthetic polynucleotide
  Category: MG37 sgRNA1
  Description: MG37-7 sgRNA1
  modified_base (103)..(126): a, c, u, g, unknown or other
auuaucaauguauccuacagggguacggaauuacgcggcaugugucgucgccuucaauggccuuggcaccgcgugguagaaugagaaaucaucuacugacacnnnnnnnnnnnnnnnnnnnnnnnn

SEQ ID NO: 3661 - RNA, 104 nt, Artificial Sequence
  Description of Artificial Sequence: Synthetic polynucleotide
  Category: MG37 sgRNA2
  Description: MG37-7 sgRNA2
  modified_base (81)..(104): a, c, u, g, unknown or other
auuaucaauguauccuacagggguacggaauuacgcggcaugugucgucgccuucaauggccuuggcaccgcguggacacnnnnnnnnnnnnnnnnnnnnnnnn

SEQ ID NO: 3662 - RNA, 84 nt, Artificial Sequence
  Description of Artificial Sequence: Synthetic oligonucleotide
  Category: MG37 tracrRNA
  Description: MG37-7 tracrRNA
auuaucaauguauccuacagggguacggaauuacgcggcaugugucgucgccuucaauggccuuggcaccgcgugguagaauga

SEQ ID NO: 3663 - RNA, 37 nt, Artificial Sequence
  Description of Artificial Sequence: Synthetic oligonucleotide
  Category: MG53 repeat
  Description: MG53-1 repeat
cauaacgcccagaagaggaccugaucgcaccggacac

SEQ ID NO: 3664 - RNA, 205 nt, Artificial Sequence
  Description of Artificial Sequence: Synthetic polynucleotide
  Category: MG53 sgRNA1
  Description: MG53-1 sgRNA1
  modified_base (182)..(205): a, c, u, g, unknown or other
uucgggccuggguuccgucuauaggucgggacucacgcugagaaugugucucgccggaauguggcugcgggcgacccccgcaacugggcucggcgcgggcaaccgcgacgaggcuauggcgucucagcgggugcguucaguuucucuucugaaaagaagaggaccugaucgcaccggacacnnnnnnnnnnnnnnnnnnnnnnnn

SEQ ID NO: 3665 - RNA, 175 nt, Artificial Sequence
  Description of Artificial Sequence: Synthetic polynucleotide
  Category: MG53 sgRNA2
  Description: MG53-1 sgRNA2
  modified_base (152)..(175): a, c, u, g, unknown or other
uucgggccuggguuccgucuauaggucgggacucacgcugagaaugugucucgccggaauguggcugcgggcgacccccgcaacugggcucggcgcgggcaaccgcgacgaggcuauggcgucucagcgggugcggaaacgcaccggacacnnnnnnnnnnnnnnnnnnnnnnnn

SEQ ID NO: 3666 - RNA, 210 nt, Artificial Sequence
  Description of Artificial Sequence: Synthetic polynucleotide
  Category: MG53 sgRNA3
  Description: MG53-1 sgRNA3
  modified_base (187)..(210): a, c, u, g, unknown or other
uucggccgccguagguucauauucguacuguggccuucgggccuggguuccgucuauaggucgggacucacgcugagaaugugucucgccggaauguggcugcgggcgacccccgcaacugggcucggcgcgggcaaccgcgacgaggcuauggcgucucagcgggugcggaaacgcaccggacacnnnnnnnnnnnnnnnnnnnnnnnn

SEQ ID NO: 3667 - RNA, 240 nt, Artificial Sequence
  Description of Artificial Sequence: Synthetic polynucleotide
  Category: MG53 sgRNA4
  Description: MG53-1 sgRNA4
  modified_base (217)..(240): a, c, u, g, unknown or other
uucggccgccguagguucauauucguacuguggccuucgggccuggguuccgucuauaggucgggacucacgcugagaaugugucucgccggaauguggcugcgggcgacccccgcaacugggcucggcgcgggcaaccgcgacgaggcuauggcgucucagcgggugcguucaguuucucuucugaaaagaagaggaccugaucgcaccggacacnnnnnnnnnnnnnnnnnnnnnnnn

SEQ ID NO: 3668 - RNA, 150 nt, Artificial Sequence
  Description of Artificial Sequence: Synthetic polynucleotide
  Category: MG53 tracrRNA1
  Description: MG53-1 tracrRNA1
uucgggccuggguuccgucuauaggucgggacucacgcugagaaugugucucgccggaauguggcugcgggcgacccccgcaacugggcucggcgcgggcaaccgcgacgaggcuauggcgucucagcgggugcguucaguuucucuucu

SEQ ID NO: 3669 - RNA, 228 nt, Artificial Sequence
  Description of Artificial Sequence: Synthetic polynucleotide
  Category: MG53 tracrRNA2
  Description: MG53-1 tracrRNA2
gccacacgggcaauacggggcuuugcucgcagaccccuugacuuucggccgccguagguucauauucguacuguggccuucgggccuggguuccgucuauaggucgggacucacgcugagaaugugucucgccggaauguggcugcgggcgacccccgcaacugggcucggcgcgggcaaccgcgacgaggcuauggcgucucagcgggugcguucaguuucucuucu

SEQ ID NO: 3670 - RNA, 36 nt, Artificial Sequence
  Description of Artificial Sequence: Synthetic oligonucleotide
  Category: MG54 repeat
  Description: MG54-1 repeat
gccgcgucccccgacgcgacccugaucgauggacac

SEQ ID NO: 3671 - RNA, 172 nt, Artificial Sequence
  Description of Artificial Sequence: Synthetic polynucleotide
  Category: MG54 sgRNA1
  Description: MG54-1 sgRNA1
  modified_base (149)..(172): a, c, u, g, unknown or other
cgggcagccacgcagccgucguuccugagugucaacacgugcuggcccuaaggcgcucgcgccgauggggacccgacaacggcggggcgacccgcccgcggcggcacggacggcgacggcaucgaucaggaaacugaucgauggacacnnnnnnnnnnnnnnnnnnnnnnnn

SEQ ID NO: 3672 - RNA, 217 nt, Artificial Sequence
  Description of Artificial Sequence: Synthetic polynucleotide
  Category: MG54 sgRNA2
  Description: MG54-1 sgRNA2
  modified_base (194)..(217): a, c, u, g, unknown or other
gcaucggcggggucgcguccgcccgcccagcggcuauaggcaggccgggcagccacgcagccgucguuccugagugucaacacgugcuggcccuaaggcgcucgcgccgauggggacccgacaacggcggggcgacccgcccgcggcggcacggacggcgacggcaucgaucaggaaacugaucgauggacacnnnnnnnnnnnnnnnnnnnnnnnn

SEQ ID NO: 3673 - RNA, 145 nt, Artificial Sequence
  Description of Artificial Sequence: Synthetic polynucleotide
  Category: MG54 tracrRNA1
  Description: MG54-1 tracrRNA1
cgggcagccacgcagccgucguuccugagugucaacacgugcuggcccuaaggcgcucgcgccgauggggacccgacaacggcggggcgacccgcccgcggcggcacggacggcgacggcaucgaucagcuucgcgucggcccgg

SEQ ID NO: 3674 - RNA, 129 nt, Artificial Sequence
  Description of Artificial Sequence: Synthetic polynucleotide
  Category: MG54 tracrRNA2
  Description: MG54-1 tracrRNA2
cgggcagccacgcagccgucguuccugagugucaacacgugcuggcccuaaggcgcucgcgccgauggggacccgacaacggcggggcgacccgcccgcggcggcacggacggcgacggcaucgaucag

SEQ ID NO: 3675 - RNA, 108 nt, Artificial Sequence
  Description of Artificial Sequence: Synthetic polynucleotide
  Category: MG54 tracrRNA3
  Description: MG54-1 tracrRNA3
uuccugagugucaacacgugcuggcccuaaggcgcucgcgccgauggggacccgacaacggcggggcgacccgcccgcggcggcacggacggcgacggcaucgaucag

SEQ ID NO: 3676 - RNA, 215 nt, Artificial Sequence
  Description of Artificial Sequence: Synthetic polynucleotide
  Category: MG54 tracrRNA4
  Description: MG54-1 tracrRNA4
uuccgugguauacugcacucguggagcaucggcggggucgcguccgcccgcccagcggcuauaggcaggccgggcagccacgcagccgucguuccugagugucaacacgugcuggcccuaaggcgcucgcgccgauggggacccgacaacggcggggcgacccgcccgcggcggcacggacggcgacggcaucgaucagcuucgcgucggcccgg

SEQ ID NO: 3677 - skipped

SEQ ID NO: 3678 - RNA, 44 nt, Artificial Sequence
  Description of Artificial Sequence: Synthetic oligonucleotide
  Category: MG56 effectors crRNA
  Description: MG56-1, MG56-2 effectors crRNA
  modified_base (21)..(44): a, c, u, g, unknown or other
aaauuucuacuuuuguagaunnnnnnnnnnnnnnnnnnnnnnnn

SEQ ID NO: 3679 - DNA, 36 bp, Unknown
  Description of Unknown: uncultivated organism sequence
  Category: MG56 effectors repeat
  Description: MG56-1 effector repeat
ctcaaatagacctatcaaatttctacttttgtagat

SEQ ID NO: 3680 - DNA, 36 bp, Unknown; identical to SEQ ID NO: 3679
  Description of Unknown: uncultivated organism sequence
  Category: MG56 effectors repeat
  Description: MG56-1, MG60-8 effectors repeat

SEQ ID NO: 3681 - DNA, 36 bp, Unknown
  Description of Unknown: uncultivated organism sequence
  Category: MG57 effectors repeat
  Description: MG57-3 effector repeat
gtttgaatttcatactaaatttctactgttgtagat

SEQ ID NO: 3682 - DNA, 36 bp, Unknown
  Description of Unknown: uncultivated organism sequence
  Category: MG57 effectors repeat
  Description: MG57-7 effector repeat
ctctaaataacaaataaaatttctactattgtagat

SEQ ID NO: 3683 - DNA, 36 bp, Unknown; identical to SEQ ID NO: 3682
  Description of Unknown: uncultivated organism sequence
  Category: MG57 effectors repeat
  Description: MG57-7 effector repeat

SEQ ID NO: 3684 - DNA, 36 bp, Unknown; identical to SEQ ID NO: 3682
  Description of Unknown: uncultivated organism sequence
  Category: MG57 effectors repeat
  Description: MG57-7 effector repeat

SEQ ID NO: 3685 - DNA, 36 bp, Unknown; identical to SEQ ID NO: 3682
  Description of Unknown: uncultivated organism sequence
  Category: MG57 effectors repeat
  Description: MG57-7 effector repeat

SEQ ID NO: 3686 - DNA, 36 bp, Unknown
  Description of Unknown: uncultivated organism sequence
  Category: MG57 effectors repeat
  Description: MG57-13 effector repeat
gtctaaaaggcttagacaatttctactattgtagat

SEQ ID NO: 3687 - DNA, 36 bp, Unknown
  Description of Unknown: uncultivated organism sequence
  Category: MG57 effectors repeat
  Description: MG57-14 effector repeat
ggctacaagccatattaaatttctactattgtagat

SEQ ID NO: 3688 - DNA, 36 bp, Unknown; identical to SEQ ID NO: 3687
  Description of Unknown: uncultivated organism sequence
  Category: MG57 effectors repeat
  Description: MG57-14 effector repeat

SEQ ID NO: 3689 - DNA, 36 bp, Unknown; identical to SEQ ID NO: 3687
  Description of Unknown: uncultivated organism sequence
  Category: MG57 effectors repeat
  Description: MG57-14 effector repeat

SEQ ID NO: 3690 - DNA, 23 bp, Unknown
  Description of Unknown: uncultivated organism sequence
  Category: MG57 effectors repeat
  Description: MG57-15 effector repeat
acaaaatttctactattgtagat

SEQ ID NO: 3691 - DNA, 23 bp, Unknown
  Description of Unknown: uncultivated organism sequence
  Category: MG57 effectors repeat
  Description: MG57-15 effector repeat
acaaaatttctactattgtagat

SEQ ID NO: 3692 - DNA, 23 bp, Unknown
  Description of Unknown: uncultivated organism sequence
  Category: MG57 effectors repeat
  Description: MG57-15 effector repeat
acaaaatttctactattgtagat

SEQ ID NO: 3693 - DNA, 23 bp, Unknown
  Description of Unknown: uncultivated organism sequence
  Category: MG57 effectors repeat
  Description: MG57-15 effector repeat
acaaaatttctactattgtagat

SEQ ID NO: 3694 - DNA, 23 bp, Unknown
  Description of Unknown: uncultivated organism sequence
  Category: MG57 effectors repeat
  Description: MG57-15 effector repeat
acaaaatttctactattgtagat

SEQ ID NO: 3695 - DNA, 43 bp, Artificial Sequence
  Description of Artificial Sequence: Synthetic oligonucleotide
  Category: MG57 guide RNA
  Description: MG57-1 sgRNA
  modified_base (20)..(43): a, c, t, g, unknown or other
aatttctactatcgtagatnnnnnnnnnnnnnnnnnnnnnnnn

SEQ ID NO: 3696 - DNA, 44 bp, Artificial Sequence
  Description of Artificial Sequence: Synthetic oligonucleotide
  Category: MG57 guide RNA
  Description: MG57-2 sgRNA
  modified_base (21)..(44): a, c, t, g, unknown or other
aatttctactagtgtagattnnnnnnnnnnnnnnnnnnnnnnnn

SEQ ID NO: 3697 - DNA, 36 bp, Unknown
  Description of Unknown: uncultivated organism sequence
  Category: MG58 effectors repeat
  Description: MG58-1 effector repeat
gtttagaaattatataagatttctacttttgtagat

SEQ ID NO: 3698 - DNA, 36 bp, Unknown; identical to SEQ ID NO: 3697
  Description of Unknown: uncultivated organism sequence
  Category: MG58 effectors repeat
  Description: MG58-1, MG58-6, MG60-1 effectors repeat

SEQ ID NO: 3699 - DNA, 36 bp, Unknown
  Description of Unknown: uncultivated organism sequence
  Category: MG58 effectors repeat
  Description: MG58-2 effector repeat
atcaattactagtttccaatttctacttttgtagat

SEQ ID NO: 3700 - DNA, 36 bp, Unknown
  Description of Unknown: uncultivated organism sequence
  Category: MG58 effectors repeat
  Description: MG58-3 effector repeat
gtttagaacttatataagatttctacttttgtagat

SEQ ID NO: 3701 - DNA, 36 bp, Unknown; identical to SEQ ID NO: 3700
  Description of Unknown: uncultivated organism sequence
  Category: MG58 effectors repeat
  Description: MG58-3, MG58-7 effectors repeat

SEQ ID NO: 3702 - DNA, 36 bp, Unknown
  Description of Unknown: uncultivated organism sequence
  Category: MG58 effectors repeat
  Description: MG58-4 effector repeat
gtttagaagttatataagatttctacttttgtagat

SEQ ID NO: 3703 - DNA, 36 bp, Unknown; identical to SEQ ID NO: 3702
  Description of Unknown: uncultivated organism sequence
  Category: MG58 effectors repeat
  Description: MG58-4, MG58-11, MG60-7 effectors repeat

SEQ ID NO: 3704 - DNA, 36 bp, Unknown; identical to SEQ ID NO: 3697
  Description of Unknown: uncultivated organism sequence
  Category: MG58 effectors repeat
  Description: MG58-6 effector repeat

SEQ ID NO: 3705 - DNA, 36 bp, Unknown; identical to SEQ ID NO: 3700
  Description of Unknown: uncultivated organism sequence
  Category: MG58 effectors repeat
  Description: MG58-7 effector repeat

SEQ ID NO: 3706 - DNA, 36 bp, Unknown
  Description of Unknown: uncultivated organism sequence
  Category: MG58 effectors repeat
  Description: MG58-10 effector repeat
gtttagaagttatataagatttctacttctgtagat

SEQ ID NO: 3707 - DNA, 36 bp, Unknown; identical to SEQ ID NO: 3706
  Description of Unknown: uncultivated organism sequence
  Category: MG58 effectors repeat
  Description: MG58-10 effector repeat

SEQ ID NO: 3708 - DNA, 36 bp, Unknown; identical to SEQ ID NO: 3702
  Description of Unknown: uncultivated organism sequence
  Category: MG58 effectors repeat
  Description: MG58-11 effector repeat

SEQ ID NO: 3709 - DNA, 36 bp, Unknown
  Description of Unknown: uncultivated organism sequence
  Category: MG58 effectors repeat
  Description: MG58-12 effector repeat
gtttagaaactatataagatttctacttttgtagat

SEQ ID NO: 3710 - DNA, 36 bp, Unknown; identical to SEQ ID NO: 3709
  Description of Unknown: uncultivated organism sequence
  Category: MG58 effectors repeat
  Description: MG58-12, MG58-13 effectors repeat

SEQ ID NO: 3711 - DNA, 36 bp, Unknown; identical to SEQ ID NO: 3709
  Description of Unknown: uncultivated organism sequence
  Category: MG58 effectors repeat
  Description: MG58-13 effector repeat

SEQ ID NO: 3712 - DNA, 36 bp, Unknown
  Description of Unknown: uncultivated organism sequence
  Category: MG59 effectors repeat
  Description: MG59-1 effector repeat
gtcaaacactccgccacaatttctactgtcgtagat

SEQ ID NO: 3713 - DNA, 36 bp, Unknown; identical to SEQ ID NO: 3712
  Description of Unknown: uncultivated organism sequence
  Category: MG59 effectors repeat
  Description: MG59-1 effector repeat

SEQ ID NO: 3714 - DNA, 36 bp, Unknown; identical to SEQ ID NO: 3712
  Description of Unknown: uncultivated organism sequence
  Category: MG59 effectors repeat
  Description: MG59-1 effector repeat

SEQ ID NO: 3715 - DNA, 32 bp, Unknown
  Description of Unknown: uncultivated organism sequence
  Category: MG59 effectors repeat
  Description: MG59-2 effector repeat
agggcccctcataaatttctactgttgtagat

SEQ ID NO: 3716 - DNA, 32 bp, Unknown; identical to SEQ ID NO: 3715
  Description of Unknown: uncultivated organism sequence
  Category: MG59 effectors repeat
  Description: MG59-2 effector repeat

SEQ ID NO: 3717 - DNA, 36 bp, Unknown
  Description of Unknown: uncultivated organism sequence
  Category: MG59 effectors repeat
  Description: MG59-3 effector repeat
gtttccccacgtggttaaatttctacttttgtagat

SEQ ID NO: 3718 - DNA, 36 bp, Unknown; identical to SEQ ID NO: 3717
  Description of Unknown: uncultivated organism sequence
  Category: MG59 effectors repeat
  Description: MG59-3 effector repeat

SEQ ID NO: 3719 - DNA, 29 bp, Unknown
  Description of Unknown: uncultivated organism sequence
  Category: MG59 effectors repeat
  Description: MG59-4 effector repeat
cacgtggtttaatttctacttttgtagat

SEQ ID NO: 3720 - DNA, 20 bp, Unknown
  Description of Unknown: uncultivated organism sequence
  Category: MG59 effectors repeat
  Description: MG59-5 effector repeat
aaatctctactgtcgtagag

SEQ ID NO: 3721 - DNA, 20 bp, Unknown
  Description of Unknown: uncultivated organism sequence
  Category: MG59 effectors repeat
  Description: MG59-5 effector repeat
aaatctctactgtcgtagag

SEQ ID NO: 3722 - DNA, 20 bp, Unknown
  Description of Unknown: uncultivated organism sequence
  Category: MG59 effectors repeat
  Description: MG59-5 effector repeat
aaatctctactgtcgtagag

SEQ ID NO: 3723 - DNA, 19 bp, Unknown
  Description of Unknown: uncultivated organism sequence
  Category: MG59 effectors repeat
  Description: MG59-6 effector repeat
aatttctactgttgtagat

SEQ ID NO: 3724 - DNA, 36 bp, Unknown
  Description of Unknown: uncultivated organism sequence
  Category: MG59 effectors repeat
  Description: MG59-7 effector repeat
gttttgcaatcttccctaatttctactgttgtagat

SEQ ID NO: 3725 - DNA, 36 bp, Unknown; identical to SEQ ID NO: 3724
  Description of Unknown: uncultivated organism sequence
  Category: MG59 effectors repeat
  Description: MG59-7, MG59-9 effectors repeat

SEQ ID NO: 3726 - DNA, 36 bp, Unknown
  Description of Unknown: uncultivated organism sequence
  Category: MG59 effectors repeat
  Description: MG59-8 effector repeat
cttttgcaatcttccctaatttctactgttgtagat

SEQ ID NO: 3727 - DNA, 36 bp, Unknown; identical to SEQ ID NO: 3726
  Description of Unknown: uncultivated organism sequence
  Category: MG59 effectors repeat
  Description: MG59-8 effector repeat

SEQ ID NO: 3728 - DNA, 36 bp, Unknown; identical to SEQ ID NO: 3724
  Description of Unknown: uncultivated organism sequence
  Category: MG59 effectors repeat
  Description: MG59-9 effector repeat

SEQ ID NO: 3729 - DNA, 43 bp, Artificial Sequence
  Description of Artificial Sequence: Synthetic oligonucleotide
  Category: MG59 guide RNA
  Description: MG59-1 sgRNA
  modified_base (20)..(43): a, c, t, g, unknown or other
aatttctactgtcgtagatnnnnnnnnnnnnnnnnnnnnnnnn

SEQ ID NO: 3730 - DNA, 43 bp, Artificial Sequence
  Description of Artificial Sequence: Synthetic oligonucleotide
  Category: MG59 guide RNA
  Description: MG59-2 sgRNA
  modified_base (20)..(43): a, c, t, g, unknown or other
aatttctactgttgtagatnnnnnnnnnnnnnnnnnnnnnnnn

SEQ ID NO: 3731 - DNA, 36 bp, Unknown
  Description of Unknown: uncultivated organism sequence
  Category: MG60 effectors repeat
  Description: MG60-3 effector repeat
gtttaaacatagtatctaatttctactttggtagat

SEQ ID NO: 3732 - DNA, 36 bp, Unknown
  Description of Unknown: uncultivated organism sequence
  Category: MG60 effectors repeat
  Description: MG60-6 effector repeat
gttgaaagaataaataaagtacctgctgttgcaggc

SEQ ID NO: 3733 - DNA, 36 bp, Unknown; identical to SEQ ID NO: 3702
  Description of Unknown: uncultivated organism sequence
  Category: MG60 effectors repeat
  Description: MG60-7 effector repeat

SEQ ID NO: 3734 - RNA, 44 nt, Artificial Sequence
  Description of Artificial Sequence: Synthetic oligonucleotide
  Category: MG61 effectors crRNA
  Description: MG61-1 effector crRNA
  modified_base (21)..(44): a, c, u, g, unknown or other
aaauaccugcuauugcaggcnnnnnnnnnnnnnnnnnnnnnnnn

SEQ ID NO: 3735 - RNA, 43 nt, Artificial Sequence
  Description of Artificial Sequence: Synthetic oligonucleotide
  Category: MG61 effectors crRNA
  Description: MG61-2 effector crRNA
  modified_base (20)..(43): a, c, u, g, unknown or other
aaaugccugcuggugcaggnnnnnnnnnnnnnnnnnnnnnnnn

SEQ ID NO: 3736 - DNA, 36 bp, Unknown
  Description of Unknown: uncultivated organism sequence
  Category: MG61 effectors repeat
  Description: MG61-1 effector repeat
ggtatataccatcaataaatacctgctattgcaggc

SEQ ID NO: 3737 - DNA, 36 bp, Unknown; identical to SEQ ID NO: 3736
  Description of Unknown: uncultivated organism sequence
  Category: MG61 effectors repeat
  Description: MG61-1 effector repeat

SEQ ID NO: 3738 - DNA, 36 bp, Unknown; identical to SEQ ID NO: 3736
  Description of Unknown: uncultivated organism sequence
  Category: MG61 effectors repeat
  Description: MG61-1 effector repeat

SEQ ID NO: 3739 - DNA, 36 bp, Unknown; identical to SEQ ID NO: 3736
  Description of Unknown: uncultivated organism sequence
  Category: MG61 effectors repeat
  Description: MG61-1 effector repeat

SEQ ID NO: 3740 - DNA, 35 bp, Unknown
  Description of Unknown: uncultivated organism sequence
  Category: MG61 effectors repeat
  Description: MG61-2 effector repeat
attataaggataatagaaatacctgctggtgcagg

SEQ ID NO: 3741 - DNA, 35 bp, Unknown; identical to SEQ ID NO: 3740
  Description of Unknown: uncultivated organism sequence
  Category: MG61 effectors repeat
  Description: MG61-2 effector repeat

SEQ ID NO: 3742 - DNA, 35 bp, Unknown; identical to SEQ ID NO: 3740
  Description of Unknown: uncultivated organism sequence
  Category: MG61 effectors repeat
  Description: MG61-2 effector repeat

SEQ ID NO: 3743 - DNA, 35 bp, Unknown; identical to SEQ ID NO: 3740
  Description of Unknown: uncultivated organism sequence
  Category: MG61 effectors repeat
  Description: MG61-2 effector repeat

SEQ ID NO: 3744 - DNA, 35 bp, Unknown; identical to SEQ ID NO: 3740
  Description of Unknown: uncultivated organism sequence
  Category: MG61 effectors repeat
  Description: MG61-2 effector repeat

SEQ ID NO: 3745 - DNA, 35 bp, Unknown; identical to SEQ ID NO: 3740
  Description of Unknown: uncultivated organism sequence
  Category: MG61 effectors repeat
  Description: MG61-2 effector repeat

SEQ ID NO: 3746 - DNA, 35 bp, Unknown
  Description of Unknown: uncultivated organism sequence
  Category: MG61 effectors repeat
  Description: MG61-3 effector repeat
gttataaagaacaaataaatgcctgctgttgcagg

SEQ ID NO: 3747 - DNA, 35 bp, Unknown; identical to SEQ ID NO: 3746
  Description of Unknown: uncultivated organism sequence
  Category: MG61 effectors repeat
  Description: MG61-3 effector repeat

SEQ ID NO: 3748 - DNA, 35 bp, Unknown; identical to SEQ ID NO: 3746
  Description of Unknown: uncultivated organism sequence
  Category: MG61 effectors repeat
  Description: MG61-3 effector repeat

SEQ ID NO: 3749 - DNA, 35 bp, Unknown; identical to SEQ ID NO: 3746
  Description of Unknown: uncultivated organism sequence
  Category: MG61 effectors repeat
  Description: MG61-3 effector repeat

SEQ ID NO: 3750 - DNA, 35 bp, Unknown; identical to SEQ ID NO: 3746
  Description of Unknown: uncultivated organism sequence
  Category: MG61 effectors repeat
  Description: MG61-3 effector repeat

SEQ ID NO: 3751 - DNA, 35 bp, Unknown; identical to SEQ ID NO: 3746
  Description of Unknown: uncultivated organism sequence
  Category: MG61 effectors repeat
  Description: MG61-3, MG61-12 effectors repeat

SEQ ID NO: 3752 - DNA, 36 bp, Unknown
  Description of Unknown: uncultivated organism sequence
  Category: MG61 effectors repeat
  Description: MG61-4 effector repeat
agttataaggaacaataaatgcctgctgctgcaggc

SEQ ID NO: 3753 - DNA, 36 bp, Unknown; identical to SEQ ID NO: 3752
  Description of Unknown: uncultivated organism sequence
  Category: MG61 effectors repeat
  Description: MG61-4 effector repeat

SEQ ID NO: 3754 - DNA, 36 bp, Unknown; identical to SEQ ID NO: 3752
  Description of Unknown: uncultivated organism sequence
  Category: MG61 effectors repeat
  Description: MG61-4 effector repeat

SEQ ID NO: 3755 - DNA, 36 bp, Unknown; identical to SEQ ID NO: 3752
  Description of Unknown: uncultivated organism sequence
  Category: MG61 effectors repeat
  Description: MG61-4 effector repeat

SEQ ID NO: 3756 - DNA, 36 bp, Unknown; identical to SEQ ID NO: 3752
  Description of Unknown: uncultivated organism sequence
  Category: MG61 effectors repeat
  Description: MG61-4 effector repeat

SEQ ID NO: 3757 - DNA, 36 bp, Unknown; identical to SEQ ID NO: 3752
  Description of Unknown: uncultivated organism sequence
  Category: MG61 effectors repeat
  Description: MG61-4 effector repeat

SEQ ID NO: 3758 - DNA, 36 bp, Unknown; identical to SEQ ID NO: 3752
  Description of Unknown: uncultivated organism sequence
  Category: MG61 effectors repeat
  Description: MG61-4 effector repeat

SEQ ID NO: 3759 - DNA, 36 bp, Unknown; identical to SEQ ID NO: 3752
  Description of Unknown: uncultivated organism sequence
  Category: MG61 effectors repeat
  Description: MG61-4 effector repeat

SEQ ID NO: 3760 - DNA, 36 bp, Unknown; identical to SEQ ID NO: 3752
  Description of Unknown: uncultivated organism sequence
  Category: MG61 effectors repeat
  Description: MG61-4, MG61-7, MG61-8, MG61-9, MG61-10, MG61-11, MG61-13, MG61-14, MG61-15 effectors repeat

SEQ ID NO: 3761 - DNA, 36 bp, Unknown
  Description of Unknown: uncultivated organism sequence
  Category: MG61 effectors repeat
  Description: MG61-5 effector repeat
gttaaaaggatcaaataaatacctgctgttgcaggc

SEQ ID NO: 3762 - DNA, 36 bp, Unknown; identical to SEQ ID NO: 3761
  Description of Unknown: uncultivated organism sequence
  Category: MG61 effectors repeat
  Description: MG61-5 effector repeat

SEQ ID NO: 3763 - DNA, 36 bp, Unknown; identical to SEQ ID NO: 3761
  Description of Unknown: uncultivated organism sequence
  Category: MG61 effectors repeat
  Description: MG61-5 effector repeat

SEQ ID NO: 3764 - DNA, 36 bp, Unknown; identical to SEQ ID NO: 3761
  Description of Unknown: uncultivated organism sequence
  Category: MG61 effectors repeat
  Description: MG61-5 effector repeat

SEQ ID NO: 3765 - DNA, 36 bp, Unknown; identical to SEQ ID NO: 3761
  Description of Unknown: uncultivated organism sequence
  Category: MG61 effectors repeat
  Description: MG61-5, MG61-6, MG61-16 effectors repeat

SEQ ID NO: 3766 - DNA, 36 bp, Unknown; identical to SEQ ID NO: 3761
  Description of Unknown: uncultivated organism sequence
  Category: MG61 effectors repeat
  Description: MG61-6 effector repeat

SEQ ID NO: 3767 - DNA, 36 bp, Unknown; identical to SEQ ID NO: 3761
  Description of Unknown: uncultivated organism sequence
  Category: MG61 effectors repeat
  Description: MG61-6 effector repeat

SEQ ID NO: 3768 - DNA, 36 bp, Unknown; identical to SEQ ID NO: 3761
  Description of Unknown: uncultivated organism sequence
  Category: MG61 effectors repeat
  Description: MG61-6 effector repeat

SEQ ID NO: 3769 - DNA, 36 bp, Unknown; identical to SEQ ID NO: 3761
  Description of Unknown: uncultivated organism sequence
  Category: MG61 effectors repeat
  Description: MG61-6 effector repeat

SEQ ID NO: 3770 - DNA, 36 bp, Unknown; identical to SEQ ID NO: 3752
  Description of Unknown: uncultivated organism sequence
  Category: MG61 effectors repeat
  Description: MG61-7 effector repeat

SEQ ID NO: 3771 - DNA, 36 bp, Unknown; identical to SEQ ID NO: 3752
  Description of Unknown: uncultivated organism sequence
  Category: MG61 effectors repeat
  Description: MG61-7 effector repeat

SEQ ID NO: 3772 - DNA, 36 bp, Unknown; identical to SEQ ID NO: 3752
  Description of Unknown: uncultivated organism sequence
  Category: MG61 effectors repeat
  Description: MG61-7 effector repeat

SEQ ID NO: 3773 - DNA, 36 bp, Unknown; identical to SEQ ID NO: 3752
  Description of Unknown: uncultivated organism sequence
  Category: MG61 effectors repeat
  Description: MG61-7 effector repeat

SEQ ID NO: 3774 - DNA, 36 bp, Unknown; identical to SEQ ID NO: 3752
  Description of Unknown: uncultivated organism sequence
  Category: MG61 effectors repeat
  Description: MG61-7 effector repeat

SEQ ID NO: 3775 - DNA, 36 bp, Unknown; identical to SEQ ID NO: 3752
  Description of Unknown: uncultivated organism sequence
  Category: MG61 effectors repeat
  Description: MG61-7 effector repeat

SEQ ID NO: 3776 - DNA, 36 bp, Unknown; identical to SEQ ID NO: 3752
  Description of Unknown: uncultivated organism sequence
  Category: MG61 effectors repeat
  Description: MG61-7 effector repeat

SEQ ID NO: 3777 - DNA, 36 bp, Unknown; identical to SEQ ID NO: 3752
  Description of Unknown: uncultivated organism sequence
  Category: MG61 effectors repeat
  Description: MG61-7 effector repeat

SEQ ID NO: 3778 - DNA, 36 bp, Unknown; identical to SEQ ID NO: 3752
  Description of Unknown: uncultivated organism sequence
  Category: MG61 effectors repeat
  Description: MG61-8 effector repeat

SEQ ID NO: 3779 - DNA, 36 bp, Unknown; identical to SEQ ID NO: 3752
  Description of Unknown: uncultivated organism sequence
  Category: MG61 effectors repeat
  Description: MG61-8 effector repeat

SEQ ID NO: 3780 - DNA, 36 bp, Unknown; identical to SEQ ID NO: 3752
  Description of Unknown: uncultivated organism sequence
  Category: MG61 effectors repeat
  Description: MG61-8 effector repeat

SEQ ID NO: 3781 - DNA, 36 bp, Unknown; identical to SEQ ID NO: 3752
  Description of Unknown: uncultivated organism sequence
  Category: MG61 effectors repeat
  Description: MG61-8 effector repeat

SEQ ID NO: 3782 - DNA, 36 bp, Unknown; identical to SEQ ID NO: 3752
  Description of Unknown: uncultivated organism sequence
  Category: MG61 effectors repeat
  Description: MG61-8 effector repeat

SEQ ID NO: 3783 - DNA, 36 bp, Unknown; identical to SEQ ID NO: 3752
  Description of Unknown: uncultivated organism sequence
  Category: MG61 effectors repeat
  Description: MG61-8 effector repeat

SEQ ID NO: 3784 - DNA, 36 bp, Unknown; identical to SEQ ID NO: 3752
  Description of Unknown: uncultivated organism sequence
  Category: MG61 effectors repeat
  Description: MG61-8 effector repeat

SEQ ID NO: 3785 - DNA, 36 bp, Unknown; identical to SEQ ID NO: 3752
  Description of Unknown: uncultivated organism sequence
  Category: MG61 effectors repeat
  Description: MG61-8 effector repeat

SEQ ID NO: 3786 - DNA, 36 bp, Unknown; identical to SEQ ID NO: 3752
  Description of Unknown: uncultivated organism sequence
  Category: MG61 effectors repeat
  Description: MG61-9 effector repeat

SEQ ID NO: 3787 - DNA, 36 bp, Unknown; identical to SEQ ID NO: 3752
  Description of Unknown: uncultivated organism sequence
  Category: MG61 effectors repeat
  Description: MG61-9 effector repeat

SEQ ID NO: 3788 - DNA, 36 bp, Unknown; identical to SEQ ID NO: 3752
  Description of Unknown: uncultivated organism sequence
  Category: MG61 effectors repeat
  Description: MG61-9 effector repeat

SEQ ID NO: 3789 - DNA, 36 bp, Unknown; identical to SEQ ID NO: 3752
  Description of Unknown: uncultivated organism sequence
  Category: MG61 effectors repeat
  Description: MG61-9 effector repeat

SEQ ID NO: 3790 - DNA, 36 bp, Unknown; identical to SEQ ID NO: 3752
  Description of Unknown: uncultivated organism sequence
  Category: MG61 effectors repeat
  Description: MG61-9 effector repeat

SEQ ID NO: 3791 - DNA, 36 bp, Unknown; identical to SEQ ID NO: 3752
  Description of Unknown: uncultivated organism sequence
  Category: MG61 effectors repeat
  Description: MG61-9 effector repeat

SEQ ID NO: 3792 - DNA, 36 bp, Unknown; identical to SEQ ID NO: 3752
  Description of Unknown: uncultivated organism sequence
  Category: MG61 effectors repeat
  Description: MG61-10 effector repeat

SEQ ID NO: 3793 - DNA, 36 bp, Unknown; identical to SEQ ID NO: 3752
  Description of Unknown: uncultivated organism sequence
  Category: MG61 effectors repeat
  Description: MG61-10 effector repeat

SEQ ID NO: 3794 - DNA, 36 bp, Unknown; identical to SEQ ID NO: 3752
  Description of Unknown: uncultivated organism sequence
  Category: MG61 effectors repeat
  Description: MG61-10 effector repeat

SEQ ID NO: 3795 - DNA, 36 bp, Unknown; identical to SEQ ID NO: 3752
  Description of Unknown: uncultivated organism sequence
  Category: MG61 effectors repeat
  Description: MG61-10 effector repeat

SEQ ID NO: 3796 - DNA, 36 bp, Unknown; identical to SEQ ID NO: 3752
  Description of Unknown: uncultivated organism sequence
  Category: MG61 effectors repeat
  Description: MG61-10 effector repeat

SEQ ID NO: 3797 - DNA, 36 bp, Unknown; identical to SEQ ID NO: 3752
  Description of Unknown: uncultivated organism sequence
  Category: MG61 effectors repeat
  Description: MG61-10 effector repeat

SEQ ID NO: 3798 - DNA, 36 bp, Unknown; identical to SEQ ID NO: 3752
  Description of Unknown: uncultivated organism sequence
  Category: MG61 effectors repeat
  Description: MG61-10 effector repeat

SEQ ID NO: 3799 - DNA, 36 bp, Unknown; identical to SEQ ID NO: 3752
  Description of Unknown: uncultivated organism sequence
  Category: MG61 effectors repeat
  Description: MG61-11 effector repeat

SEQ ID NO: 3800 - DNA, 36 bp, Unknown; identical to SEQ ID NO: 3752
  Description of Unknown: uncultivated organism sequence
  Category: MG61 effectors repeat
  Description: MG61-11 effector repeat

SEQ ID NO: 3801 - DNA, 36 bp, Unknown; identical to SEQ ID NO: 3752
  Description of Unknown: uncultivated organism sequence
  Category: MG61 effectors repeat
  Description: MG61-11 effector repeat

SEQ ID NO: 3802 - DNA, 36 bp, Unknown; identical to SEQ ID NO: 3752
  Description of Unknown: uncultivated organism sequence
  Category: MG61 effectors repeat
  Description: MG61-11 effector repeat

SEQ ID NO: 3803 - DNA, 36 bp, Unknown; identical to SEQ ID NO: 3752
  Description of Unknown: uncultivated organism sequence
  Category: MG61 effectors repeat
  Description: MG61-11 effector repeat

SEQ ID NO: 3804 - DNA, 36 bp, Unknown; identical to SEQ ID NO: 3752
  Description of Unknown: uncultivated organism sequence
  Category: MG61 effectors repeat
  Description: MG61-11 effector repeat

SEQ ID NO: 3805 - DNA, 36 bp, Unknown; identical to SEQ ID NO: 3752
  Description of Unknown: uncultivated organism sequence
  Category: MG61 effectors repeat
  Description: MG61-11 effector repeat

SEQ ID NO: 3806 - DNA, 35 bp, Unknown; identical to SEQ ID NO: 3746
  Description of Unknown: uncultivated organism sequence
  Category: MG61 effectors repeat
  Description: MG61-12 effector repeat

SEQ ID NO: 3807 - DNA, 35 bp, Unknown; identical to SEQ ID NO: 3746
  Description of Unknown: uncultivated organism sequence
  Category: MG61 effectors repeat
  Description: MG61-12 effector repeat

SEQ ID NO: 3808 - DNA, 35 bp, Unknown; identical to SEQ ID NO: 3746
  Description of Unknown: uncultivated organism sequence
  Category: MG61 effectors repeat
  Description: MG61-12 effector repeat

SEQ ID NO: 3809 - DNA, 35 bp, Unknown; identical to SEQ ID NO: 3746
  Description of Unknown: uncultivated organism sequence
  Category: MG61 effectors repeat
  Description: MG61-12 effector repeat

SEQ ID NO: 3810 - DNA, 35 bp, Unknown; identical to SEQ ID NO: 3746
  Description of Unknown: uncultivated organism sequence
  Category: MG61 effectors repeat
  Description: MG61-12 effector repeat

SEQ ID NO: 3811 - DNA, 36 bp, Unknown; identical to SEQ ID NO: 3752
  Description of Unknown: uncultivated organism sequence
  Category: MG61 effectors repeat
  Description: MG61-13 effector repeat

SEQ ID NO: 3812 - DNA, 36 bp, Unknown; identical to SEQ ID NO: 3752
  Description of Unknown: uncultivated organism sequence
  Category: MG61 effectors repeat
  Description: MG61-13 effector repeat

SEQ ID NO: 3813 - DNA, 36 bp, Unknown; identical to SEQ ID NO: 3752
  Description of Unknown: uncultivated organism sequence
  Category: MG61 effectors repeat
  Description: MG61-13 effector repeat

SEQ ID NO: 3814 - DNA, 36 bp, Unknown; identical to SEQ ID NO: 3752
  Description of Unknown: uncultivated organism sequence
  Category: MG61 effectors repeat
  Description: MG61-13 effector repeat

SEQ ID NO: 3815 - DNA, 36 bp, Unknown; identical to SEQ ID NO: 3752
  Description of Unknown: uncultivated organism sequence
  Category: MG61 effectors repeat
  Description: MG61-13 effector repeat

SEQ ID NO: 3816 - DNA, 36 bp, Unknown; identical to SEQ ID NO: 3752
  Description of Unknown: uncultivated organism sequence
  Category: MG61 effectors repeat
  Description: MG61-13 effector repeat

SEQ ID NO: 3817 - DNA, 36 bp, Unknown; identical to SEQ ID NO: 3752
  Description of Unknown: uncultivated organism sequence
  Category: MG61 effectors repeat
  Description: MG61-13 effector repeat

SEQ ID NO: 3818 - DNA, 36 bp, Unknown; identical to SEQ ID NO: 3752
  Description of Unknown: uncultivated organism sequence
  Category: MG61 effectors repeat
  Description: MG61-13 effector repeat

SEQ ID NO: 3819 - DNA, 36 bp, Unknown; identical to SEQ ID NO: 3752
  Description of Unknown: uncultivated organism sequence
  Category: MG61 effectors repeat
  Description: MG61-14 effector repeat

SEQ ID NO: 3820 - DNA, 36 bp, Unknown; identical to SEQ ID NO: 3752
  Description of Unknown: uncultivated organism sequence
  Category: MG61 effectors repeat
  Description: MG61-14 effector repeat

SEQ ID NO: 3821 - DNA, 36 bp, Unknown; identical to SEQ ID NO: 3752
  Description of Unknown: uncultivated organism sequence
  Category: MG61 effectors repeat
  Description: MG61-14 effector repeat

SEQ ID NO: 3822 - DNA, 36 bp, Unknown; identical to SEQ ID NO: 3752
  Description of Unknown: uncultivated organism sequence
  Category: MG61 effectors repeat
  Description: MG61-14 effector repeat

SEQ ID NO: 3823 - DNA, 36 bp, Unknown; identical to SEQ ID NO: 3752
  Description of Unknown: uncultivated organism sequence
  Category: MG61 effectors repeat
  Description: MG61-14 effector repeat

SEQ ID NO: 3824 - DNA, 36 bp, Unknown; identical to SEQ ID NO: 3752
  Description of Unknown: uncultivated organism sequence
  Category: MG61 effectors repeat
  Description: MG61-14 effector repeat

SEQ ID NO: 3825 - DNA, 36 bp, Unknown; identical to SEQ ID NO: 3752
  Description of Unknown: uncultivated organism sequence
  Category: MG61 effectors repeat
  Description: MG61-15 effector repeat

SEQ ID NO: 3826 - DNA, 36 bp, Unknown; identical to SEQ ID NO: 3752
  Description of Unknown: uncultivated organism sequence
  Category: MG61 effectors repeat
  Description: MG61-15 effector repeat

SEQ ID NO: 3827 - DNA, 36 bp, Unknown; identical to SEQ ID NO: 3752
  Description of Unknown: uncultivated organism sequence
  Category: MG61 effectors repeat
  Description: MG61-15 effector repeat

SEQ ID NO: 3828 - DNA, 36 bp, Unknown; identical to SEQ ID NO: 3752
  Description of Unknown: uncultivated organism sequence
  Category: MG61 effectors repeat
  Description: MG61-15 effector repeat

SEQ ID NO: 3829 - DNA, 36 bp, Unknown; identical to SEQ ID NO: 3752
  Description of Unknown: uncultivated organism sequence
  Category: MG61 effectors repeat
  Description: MG61-15 effector repeat

SEQ ID NO: 3830 - DNA, 36 bp, Unknown; identical to SEQ ID NO: 3752
  Description of Unknown: uncultivated organism sequence
  Category: MG61 effectors repeat
  Description: MG61-15 effector repeat

SEQ ID NO: 3831 - DNA, 36 bp, Unknown; identical to SEQ ID NO: 3761
  Description of Unknown: uncultivated organism sequence
  Category: MG61 effectors repeat
  Description: MG61-16 effector repeat

SEQ ID NO: 3832 - DNA, 36 bp, Unknown; identical to SEQ ID NO: 3761
  Description of Unknown: uncultivated organism sequence
  Category: MG61 effectors repeat
  Description: MG61-16 effector repeat

SEQ ID NO: 3833 - DNA, 36 bp, Unknown; identical to SEQ ID NO: 3761
  Description of Unknown: uncultivated organism sequence
  Category: MG61 effectors repeat
  Description: MG61-16 effector repeat

SEQ ID NO: 3834 - DNA, 36 bp, Unknown; identical to SEQ ID NO: 3761
  Description of Unknown: uncultivated organism sequence
  Category: MG61 effectors repeat
  Description: MG61-16 effector repeat

SEQ ID NO: 3835 - DNA, 36 bp, Unknown; identical to SEQ ID NO: 3761
  Description of Unknown: uncultivated organism sequence
  Category: MG61 effectors repeat
  Description: MG61-16 effector repeat

SEQ ID NO: 3836 - DNA, 36 bp, Unknown; identical to SEQ ID NO: 3761
  Description of Unknown: uncultivated organism sequence
  Category: MG61 effectors repeat
  Description: MG61-16 effector repeat

SEQ ID NO: 3837 - DNA, 36 bp, Unknown; identical to SEQ ID NO: 3761
  Description of Unknown: uncultivated organism sequence
  Category: MG61 effectors repeat
  Description: MG61-16 effector repeat

SEQ ID NO: 3838 - DNA, 36 bp, Unknown; identical to SEQ ID NO: 3761
  Description of Unknown: uncultivated organism sequence
  Category: MG61 effectors repeat
  Description: MG61-16 effector repeat

SEQ ID NO: 3839 - DNA, 36 bp, Unknown; identical to SEQ ID NO: 3761
  Description of Unknown: uncultivated organism sequence
  Category: MG61 effectors repeat
  Description: MG61-16 effector repeat

SEQ ID NO: 3840 - DNA, 36 bp, Unknown; identical to SEQ ID NO: 3761
  Description of Unknown: uncultivated organism sequence
  Category: MG61 effectors repeat
  Description: MG61-16 effector repeat

SEQ ID NO: 3841 - DNA, 36 bp, Unknown; identical to SEQ ID NO: 3761
  Description of Unknown: uncultivated organism sequence
  Category: MG61 effectors repeat
  Description: MG61-16 effector repeat

SEQ ID NO: 3842 - DNA, 36 bp, Unknown
  Description of Unknown: uncultivated organism sequence
  Category: MG61 effectors repeat
  Description: MG61-17 effector repeat
ggttataaggaagcaataaatgcctgctgatgcagg

SEQ ID NO: 3843 - DNA, 36 bp, Unknown; identical to SEQ ID NO: 3842
  Description of Unknown: uncultivated organism sequence
  Category: MG61 effectors repeat
  Description: MG61-17 effector repeat

SEQ ID NO: 3844 - DNA, 36 bp, Unknown; identical to SEQ ID NO: 3842
  Description of Unknown: uncultivated organism sequence
  Category: MG61 effectors repeat
  Description: MG61-17 effector repeat

SEQ ID NO: 3845 - DNA, 36 bp, Unknown; identical to SEQ ID NO: 3842
  Description of Unknown: uncultivated organism sequence
  Category: MG61 effectors repeat
  Description: MG61-17 effector repeat

SEQ ID NO: 3846 - DNA, 36 bp, Unknown; identical to SEQ ID NO: 3842
  Description of Unknown: uncultivated organism sequence
  Category: MG61 effectors repeat
  Description: MG61-17 effector repeat

SEQ ID NO: 3847 - DNA, 36 bp, Unknown; identical to SEQ ID NO: 3842
  Description of Unknown: uncultivated organism sequence
  Category: MG61 effectors repeat
  Description: MG61-17 effector repeat

SEQ ID NO: 3848 - DNA, 35 bp, Unknown
  Description of Unknown: uncultivated organism sequence
  Category: MG62 effectors repeat
  Description: MG62-2 effector repeat
tttaaacatagtatctaatttctacttttgtagat

SEQ ID NO: 3849 - DNA, 37 bp, Unknown
  Description of Unknown: uncultivated organism sequence
  Category: MG62 effectors repeat
  Description: MG62-3 effector repeat
gtttaaacatagtatctaatttctactttggtagata

SEQ ID NO: 3850 - DNA, 37 bp, Unknown
  Description of Unknown: uncultivated organism sequence
  Category: MG62 effectors repeat
  Description: MG62-3 effector repeat
gtttaaacatagtatctaatttctactttggtagatt

SEQ ID NO: 3851 - DNA, 43 bp, Unknown
  Description of Unknown: uncultivated organism sequence
  Category: MG77 guide RNA
  Description: MG77-1 sgRNA
  modified_base (20)..(43): a, c, t, g, unknown or other
  misc_feature (20)..(43): This region may encompass 20 or 24 nucleotides
aatttctactctggtagatnnnnnnnnnnnnnnnnnnnnnnnn

SEQ ID NO: 3852 - DNA, 43 bp, Unknown
  Description of Unknown: uncultivated organism sequence
  Category: MG77 guide RNA
  Description: MG77-2 sgRNA
  modified_base (20)..(43): a, c, t, g, unknown or other
  misc_feature (20)..(43): This region may encompass 20 or 24 nucleotides
aatttctacttgtgtagatnnnnnnnnnnnnnnnnnnnnnnnn

SEQ ID NO: 3853 - DNA, 43 bp, Unknown; identical to SEQ ID NO: 3730
  Description of Unknown: uncultivated organism sequence
  Category: MG78 guide RNA
  Description: MG78-1 sgRNA
  modified_base (20)..(43): a, c, t, g, unknown or other
  misc_feature (20)..(43): This region may encompass 20 or 24 nucleotides

SEQ ID NO: 3854 - DNA, 43 bp, Unknown
  Description of Unknown: uncultivated organism sequence
  Category: MG79 guide RNA
  Description: MG79-1 sgRNA
  modified_base (20)..(43): a, c, t, g, unknown or other
  misc_feature (20)..(43): This region may encompass 20 or 24 nucleotides
aatttctactaatgtagatnnnnnnnnnnnnnnnnnnnnnnnn

SEQ ID NO: 3855 - DNA, 43 bp, Unknown
  Description of Unknown: uncultivated organism sequence
  Category: MG79 guide RNA
  Description: MG79-2 sgRNA
  modified_base (20)..(43): a, c, t, g, unknown or other
  misc_feature (20)..(43): This region may encompass 20 or 24 nucleotides
aatttctactattgtagatnnnnnnnnnnnnnnnnnnnnnnnn

SEQ ID NO: 3856 - DNA, 43 bp, Unknown; identical to SEQ ID NO: 3695
  Description of Unknown: uncultivated organism sequence
  Category: MG79 guide RNA
  Description: MG79-3 sgRNA
  modified_base (20)..(43): a, c, t, g, unknown or other
  misc_feature (20)..(43): This region may encompass 20 or 24 nucleotides

SEQ ID NO: 3857 - DNA, 43 bp, Unknown; identical to SEQ ID NO: 3855
  Description of Unknown: uncultivated organism sequence
  Category: MG79 guide RNA
  Description: MG79-4 sgRNA
  modified_base (20)..(43): a, c, t, g, unknown or other
  misc_feature (20)..(43): This region may encompass 20 or 24 nucleotides

SEQ ID NO: 3858 - DNA, 24 bp, Artificial Sequence
  Description of Artificial Sequence: Synthetic oligonucleotide
  Category: Spacer segment
  Description: spacer segment 3
gtcgaggcttgcgacgtggtggct

SEQ ID NO: 3859 - DNA, 24 bp, Artificial Sequence
  Description of Artificial Sequence: Synthetic oligonucleotide
  Category: Spacer segment
  Description: Spacer segment 4
tggagatatcttgaaccttgcatc

SEQ ID NO: 3860 - DNA, 24 bp, Artificial Sequence
  Description of Artificial Sequence: Synthetic oligonucleotide
  Category: spacer segment
  Description: spacer segment 1
cgtgagccaccacgtcgcaagcct

SEQ ID NO: 3861 - DNA, 24 bp, Artificial Sequence
  Description of Artificial Sequence: Synthetic oligonucleotide
  Category: spacer segment
  Description: spacer segment 2
gtcgaggcttgcgacgtggtggct

SEQ ID NO: 3862 - skipped

SEQ ID NO: 3863 - DNA, 2 bp, Artificial Sequence
  Description of Artificial Sequence: Synthetic oligonucleotide
  Category: MG19 active effectors PAM
  Description: MG19-2 PAM
ta

SEQ ID NO: 3864 - DNA, 2 bp, Artificial Sequence
  Description of Artificial Sequence: Synthetic oligonucleotide
  Category: MG19 active effectors PAM
  Description: MG19-3 PAM
ta

SEQ ID NO: 3865 - DNA, 2 bp, Artificial Sequence
  Description of Artificial Sequence: Synthetic oligonucleotide
  Category: MG19 active effectors PAM
  Description: MG19-4 PAM
tr

SEQ ID NO: 3866 - DNA, 3 bp, Artificial Sequence
  Description of Artificial Sequence: Synthetic oligonucleotide
  Category: MG19 active effectors PAM
  Description: MG19-5 PAM
ttr

SEQ ID NO: 3867 - DNA, 3 bp, Artificial Sequence
  Description of Artificial Sequence: Synthetic oligonucleotide
  Category: MG20 active effectors PAM
  Description: MG20-1 PAM
tta

SEQ ID NO: 3868 - DNA, 4 bp, Artificial Sequence
  Description of Artificial Sequence: Synthetic oligonucleotide
  Category: MG28 active effectors PAM
  Description: MG28-1 PAM (5') from NGS
  modified_base (4)..(4): a, c, t, g, unknown or other
tttn

SEQ ID NO: 3869 - DNA, 26 bp, Unknown
  Description of Unknown: uncultivated organism sequence
  Category: MG28 effectors repeat
  Description: MG28-10, MG28-11 effectors repeat
catataaaatttctactattgtagat

SEQ ID NO: 3870 - DNA, 4 bp, Artificial Sequence
  Description of Artificial Sequence: Synthetic oligonucleotide
  Category: MG29 active effectors PAM
  Description: MG29-1 PAM (5')
kttg

SEQ ID NO: 3871 - DNA, 3 bp, Artificial Sequence
  Description of Artificial Sequence: Synthetic oligonucleotide
  Category: MG29 active effectors PAM
  Description: MG29-1 PAM (5') from NGS
  modified_base (3)..(3): a, c, t, g, unknown or other
yyn

SEQ ID NO: 3872 - DNA, 4 bp, Artificial Sequence
  Description of Artificial Sequence: Synthetic oligonucleotide
  Category: MG29 active effectors PAM
  Description: MG29-5 PAM
  modified_base (4)..(4): a, c, t, g, unknown or other
yyyn

SEQ ID NO: 3873 - DNA, 4 bp, Artificial Sequence
  Description of Artificial Sequence: Synthetic oligonucleotide
  Category: MG30 active effectors PAM
  Description: MG30-1 PAM (5')
  modified_base (4)..(4): a, c, t, g, unknown or other
tttn

SEQ ID NO: 3874 - DNA, 4 bp, Artificial Sequence
  Description of Artificial Sequence: Synthetic oligonucleotide
  Category: MG31 active effectors PAM
  Description: MG31-1 PAM
tttr

SEQ ID NO: 3875 - DNA, 4 bp, Artificial Sequence
  Description of Artificial Sequence: Synthetic oligonucleotide
  Category: MG31 active effectors PAM
  Description: MG31-1 PAM (5') from NGS
  modified_base (4)..(4): a, c, t, g, unknown or other
yttn

SEQ ID NO: 3876 - DNA, 4 bp, Artificial Sequence
  Description of Artificial Sequence: Synthetic oligonucleotide
  Category: MG31 active effectors, MG32 active effectors PAM (5')
  Description: MG31-1, MG32-1 PAM (5')
yttm

SEQ ID NO: 3877 - DNA, 4 bp, Artificial Sequence
  Description of Artificial Sequence: Synthetic oligonucleotide
  Category: MG32 active effectors PAM
  Description: MG32-1 PAM (5') from NGS
  modified_base (4)..(4): a, c, t, g, unknown or other
tttn

SEQ ID NO: 3878 - skipped

SEQ ID NO: 3879 - DNA, 2 bp, Artificial Sequence
  Description of Artificial Sequence: Synthetic oligonucleotide
  Category: MG57 active effectors PAM
  Description: MG57-1 PAM
  modified_base (2)..(2): a, c, t, g, unknown or other
yn

SEQ ID NO: 3880 - DNA, 4 bp, Artificial Sequence
  Description of Artificial Sequence: Synthetic oligonucleotide
  Category: MG57 active effectors PAM
  Description: MG57-2 PAM
  modified_base (3)..(3): a, c, t, g, unknown or other
yynw

SEQ ID NO: 3881 - DNA, 3 bp, Artificial Sequence
  Description of Artificial Sequence: Synthetic oligonucleotide
  Category: MG59 active effectors PAM
  Description: MG59-1 PAM
  modified_base (3)..(3): a, c, t, g, unknown or other
yyn

SEQ ID NO: 3882 - DNA, 4 bp, Artificial Sequence
  Description of Artificial Sequence: Synthetic oligonucleotide
  Category: MG59 active effectors PAM
  Description: MG59-2 PAM
yttv

SEQ ID NO: 3883 - DNA, 3 bp, Artificial Sequence
  Description of Artificial Sequence: Synthetic oligonucleotide
  Category: MG77 active effectors PAM
  Description: MG77-1 PAM
  modified_base (3)..(3): a, c, t, g, unknown or other
ttn

SEQ ID NO: 3884 - DNA, 3 bp, Artificial Sequence
  Description of Artificial Sequence: Synthetic oligonucleotide
  Category: MG77 active effectors PAM
  Description: MG77-2 PAM
  modified_base (3)..(3): a, c, t, g, unknown or other
ttn

SEQ ID NO: 3885 - DNA, 3 bp, Artificial Sequence
  Description of Artificial Sequence: Synthetic oligonucleotide
  Category: MG78 active effectors PAM
  Description: MG78-1 PAM
  modified_base (3)..(3): a, c, t, g, unknown or other
yyn

SEQ ID NO: 3886 - DNA, 3 bp, Artificial Sequence
  Description of Artificial Sequence: Synthetic oligonucleotide
  Category: MG79 active effectors PAM
  Description: MG79-1 PAM
ttr

SEQ ID NO: 3887 - DNA, 3 bp, Artificial Sequence
  Description of Artificial Sequence: Synthetic oligonucleotide
  Category: MG79 active effectors PAM
  Description: MG79-2 PAM
ttr

SEQ ID NO: 3888 - DNA, 4 bp, Artificial Sequence
  Description of Artificial Sequence: Synthetic oligonucleotide
  Category: MG79 active effectors PAM
  Description: MG79-3 PAM
  modified_base (4)..(4): a, c, t, g, unknown or other
tttn

SEQ ID NO: 3889 - DNA, 3 bp, Artificial Sequence
  Description of Artificial Sequence: Synthetic oligonucleotide
  Category: MG79 active effectors PAM
  Description: MG79-4 PAM
  modified_base (3)..(3): a, c, t, g, unknown or other
ttn

SEQ ID NO: 3890 - DNA, 10 bp, Artificial Sequence
  Description of Artificial Sequence: Synthetic oligonucleotide
  Category: PAM Sequence
  Description: PAM sequence corresponding to MG29-1 Target Loci 1
aacacagttg

SEQ ID NO: 3891 - DNA, 10 bp, Artificial Sequence
  Description of Artificial Sequence: Synthetic oligonucleotide
  Category: PAM Sequence
  Description: PAM sequence corresponding to MG29-1 Target Loci 2
tacagttttg

SEQ ID NO: 3892 - DNA, 10 bp, Artificial Sequence
  Description of Artificial Sequence: Synthetic oligonucleotide
  Category: PAM Sequence
  Description: PAM sequence corresponding to MG29-1 Target Loci 3
tttgaggttg

SEQ ID NO: 3893 - DNA, 10 bp, Artificial Sequence
  Description of Artificial Sequence: Synthetic oligonucleotide
  Category: PAM Sequence
  Description: PAM sequence corresponding to MG29-1 Target Loci 4
tttgtatttg

SEQ ID NO: 3894 - DNA, 10 bp, Artificial Sequence
  Description of Artificial Sequence: Synthetic oligonucleotide
  Category: PAM Sequence
  Description: PAM sequence corresponding to MG29-1 Target Loci 5
agttactttg

SEQ ID NO: 3895 - DNA, 10 bp, Artificial Sequence
  Description of Artificial Sequence: Synthetic oligonucleotide
  Category: PAM Sequence
  Description: PAM sequence corresponding to MG29-1 Target Loci 6
gatgaagttg

SEQ ID NO: 3896 - DNA, 10 bp, Artificial Sequence
  Description of Artificial Sequence: Synthetic oligonucleotide
  Category: PAM Sequence
  Description: PAM sequence corresponding to MG29-1 Target Loci 7
tagctgtttg

SEQ ID NO: 3897 - DNA, 10 bp, Artificial Sequence
  Description of Artificial Sequence: Synthetic oligonucleotide
  Category: PAM Sequence
  Description: PAM sequence corresponding to MG29-1 Target Loci 8
atgggctttg

SEQ ID NO: 3898 - DNA, 10 bp, Artificial Sequence
  Description of Artificial Sequence: Synthetic oligonucleotide
  Category: PAM Sequence
  Description: PAM sequence corresponding to MG29-1 Target Loci 9
gggcaggttg

SEQ ID NO: 3899 - DNA, 10 bp, Artificial Sequence
  Description of Artificial Sequence: Synthetic oligonucleotide
  Category: PAM Sequence
  Description: PAM sequence corresponding to MG29-1 Target Loci 10
tacatagttg

SEQ ID NO: 3900 - DNA, 10 bp, Artificial Sequence
  Description of Artificial Sequence: Synthetic oligonucleotide
  Category: PAM Sequence
  Description: PAM sequence corresponding to MG29-1 Target Loci 11
tacgcatttg

SEQ ID NO: 3901 - DNA, 10 bp, Artificial Sequence
  Description of Artificial Sequence: Synthetic oligonucleotide
  Category: PAM Sequence
  Description: PAM sequence corresponding to MG29-1 Target Loci 12
ccgcaagttg

SEQ ID NO: 3902 - DNA, 10 bp, Artificial Sequence
  Description of Artificial Sequence: Synthetic oligonucleotide
  Category: PAM Sequence
  Description: PAM sequence corresponding to MG31-1 Target Loci 1
gttttcttta

SEQ ID NO: 3903 - DNA, 10 bp, Artificial Sequence
  Description of Artificial Sequence: Synthetic oligonucleotide
  Category: PAM Sequence
  Description: PAM sequence corresponding to MG31-1 Target Loci 2
tacagttttg

SEQ ID NO: 3904 - DNA, 10 bp, Artificial Sequence
  Description of Artificial Sequence: Synthetic oligonucleotide
  Category: PAM Sequence
  Description: PAM sequence corresponding to MG31-1 Target Loci 3
agaactttta

SEQ ID NO: 3905 - DNA, 10 bp, Artificial Sequence
  Description of Artificial Sequence: Synthetic oligonucleotide
  Category: PAM Sequence
  Description: PAM sequence corresponding to MG31-1 Target Loci 4
tttgtatttg

SEQ ID NO: 3906 - DNA, 10 bp, Artificial Sequence
  Description of Artificial Sequence: Synthetic oligonucleotide
  Category: PAM Sequence
  Description: PAM sequence corresponding to MG31-1 Target Loci 5
agttactttg

SEQ ID NO: 3907 - DNA, 10 bp, Artificial Sequence
  Description of Artificial Sequence: Synthetic oligonucleotide
  Category: PAM Sequence
  Description: PAM sequence corresponding to MG31-1 Target Loci 6
ttttttttta

SEQ ID NO: 3908 - DNA, 10 bp, Artificial Sequence
  Description of Artificial Sequence: Synthetic oligonucleotide
  Category: PAM Sequence
  Description: PAM sequence corresponding to MG31-1 Target Loci 7
tagctgtttg

SEQ ID NO: 3909 - DNA, 10 bp, Artificial Sequence
  Description of Artificial Sequence: Synthetic oligonucleotide
  Category: PAM Sequence
  Description: PAM sequence corresponding to MG31-1 Target Loci 8
atgggctttg

SEQ ID NO: 3910 - DNA, 10 bp, Artificial Sequence
  Description of Artificial Sequence: Synthetic oligonucleotide
  Category: PAM Sequence
  Description: PAM sequence corresponding to MG31-1 Target Loci 9
tccctcttta

SEQ ID NO: 3911 - DNA, 10 bp, Artificial Sequence
  Description of Artificial Sequence: Synthetic oligonucleotide
  Category: PAM Sequence
  Description: PAM sequence corresponding to MG31-1 Target Loci 10
acaaatttta

SEQ ID NO: 3912 - DNA, 10 bp, Artificial Sequence
  Description of Artificial Sequence: Synthetic oligonucleotide
  Category: PAM Sequence
  Description: PAM sequence corresponding to MG31-1 Target Loci 11
tacgcatttg

SEQ ID NO: 3913 - DNA, 10 bp, Artificial Sequence
  Description of Artificial Sequence: Synthetic oligonucleotide
  Category: PAM Sequence
  Description: PAM sequence corresponding to MG31-1 Target Loci 12
gaaaaattta

SEQ ID NO: 3914 - DNA, 24 bp, Artificial Sequence
  Description of Artificial Sequence: Synthetic oligonucleotide
  Category: Target Sequence
  Description: MG29-1 Target Loci 1
tgtcagaagcaaatgtaagcaata

SEQ ID NO: 3915 - DNA, 24 bp, Artificial Sequence
  Description of Artificial Sequence: Synthetic oligonucleotide
  Category: Target Sequence
  Description: MG29-1 Target Loci 2
ctgaaaggttattgttgtgtttgt

SEQ ID NO: 3916 - DNA, 24 bp, Artificial Sequence
  Description of Artificial Sequence: Synthetic oligonucleotide
  Category: Target Sequence
  Description: MG29-1 Target Loci 3
ctagtgaacacagttgtgtcagaa

SEQ ID NO: 3917 - DNA, 24 bp, Artificial Sequence
  Description of Artificial Sequence: Synthetic oligonucleotide
  Category: Target Sequence
  Description: MG29-1 Target Loci 4
tgaagtcttacaaggttatcttat

SEQ ID NO: 3918 - DNA, 24 bp, Artificial Sequence
  Description of Artificial Sequence: Synthetic oligonucleotide
  Category: Target Sequence
  Description: MG29-1 Target Loci 5
cactttccttagtgcgcaaaagaa

SEQ ID NO: 3919 - DNA, 24 bp, Artificial Sequence
  Description of Artificial Sequence: Synthetic oligonucleotide
  Category: Target Sequence
  Description: MG29-1 Target Loci 6
gtggtgaggccctgggcaggttgg

SEQ ID NO: 3920 - DNA, 24 bp, Artificial Sequence
  Description of Artificial Sequence: Synthetic oligonucleotide
  Category: Target Sequence
  Description: MG29-1 Target Loci 7
ggaggtcagaaatagggggtccag

SEQ ID NO: 3921 - DNA, 24 bp, Artificial Sequence
  Description of Artificial Sequence: Synthetic oligonucleotide
  Category: Target Sequence
  Description: MG29-1 Target Loci 8
gaaagggggtggggggagtttgct

SEQ ID NO: 3922 - DNA, 24 bp, Artificial Sequence
  Description of Artificial Sequence: Synthetic oligonucleotide
  Category: Target Sequence
  Description: MG29-1 Target Loci 9
gtatcaaggttacaagacaggttt

SEQ ID NO: 3923 - DNA, 24 bp, Artificial Sequence
  Description of Artificial Sequence: Synthetic oligonucleotide
  Category: Target Sequence
  Description: MG29-1 Target Loci 10
tgtgagggagcaccgttctctaga

SEQ ID NO: 3924 - DNA, 24 bp, Artificial Sequence
  Description of Artificial Sequence: Synthetic oligonucleotide
  Category: Target Sequence
  Description: MG29-1 Target Loci 11
ggtagttttctgtggtcctattat

SEQ ID NO: 3925 - DNA, 24 bp, Artificial Sequence
  Description of Artificial Sequence: Synthetic oligonucleotide
  Category: Target Sequence
  Description: MG29-1 Target Loci 12
ccaggaaagttgatgtggtctgcg

SEQ ID NO: 3926 - DNA, 24 bp, Artificial Sequence
  Description of Artificial Sequence: Synthetic oligonucleotide
  Category: Target Sequence
  Description: MG31-1 Target Loci 1
gttattaatttcttgctacttgtc

SEQ ID NO: 3927 - DNA, 24 bp, Artificial Sequence
  Description of Artificial Sequence: Synthetic oligonucleotide
  Category: Target Sequence
  Description: MG31-1 Target Loci 2
ctgaaaggttattgttgtgtttgt

SEQ ID NO: 3928 - DNA, 24 bp, Artificial Sequence
  Description of Artificial Sequence: Synthetic oligonucleotide
  Category: Target Sequence
  Description: MG31-1 Target Loci 3
gtgttagtacagttttgctgaaag

SEQ ID NO: 3929 - DNA, 24 bp, Artificial Sequence
  Description of Artificial Sequence: Synthetic oligonucleotide
  Category: Target Sequence
  Description: MG31-1 Target Loci 4
tgaagtcttacaaggttatcttat

SEQ ID NO: 3930 - DNA, 24 bp, Artificial Sequence
  Description of Artificial Sequence: Synthetic oligonucleotide
  Category: Target Sequence
  Description: MG31-1 Target Loci 5
cactttccttagtgcgcaaaagaa

SEQ ID NO: 3931 - DNA, 24 bp, Artificial Sequence
  Description of Artificial Sequence: Synthetic oligonucleotide
  Category: Target Sequence
  Description: MG31-1 Target Loci 6
cctaggatgtttgaattttattaa

SEQ ID NO: 3932 - DNA, 24 bp, Artificial Sequence
  Description of Artificial Sequence: Synthetic oligonucleotide
  Category: Target Sequence
  Description: MG31-1 Target Loci 7
ggaggtcagaaatagggggtccag

SEQ ID NO: 3933 - DNA, 24 bp, Artificial Sequence
  Description of Artificial Sequence: Synthetic oligonucleotide
  Category: Target Sequence
  Description: MG31-1 Target Loci 8
gaaagggggtggggggagtttgct

SEQ ID NO: 3934 - DNA, 24 bp, Artificial Sequence
  Description of Artificial Sequence: Synthetic oligonucleotide
  Category: Target Sequence
  Description: MG31-1 Target Loci 9
gccagagccggggtgtgcagacgg

SEQ ID NO: 3935 - DNA, 24 bp, Artificial Sequence
  Description of Artificial Sequence: Synthetic oligonucleotide
  Category: Target Sequence
  Description: MG31-1 Target Loci 10
cttggaccttgttttgcttactgt

SEQ ID NO: 3936 - DNA, 24 bp, Artificial Sequence
  Description of Artificial Sequence: Synthetic oligonucleotide
  Category: Target Sequence
  Description: MG31-1 Target Loci 11
ggtagttttctgtggtcctattat

SEQ ID NO: 3937 - DNA, 24 bp, Artificial Sequence
  Description of Artificial Sequence: Synthetic oligonucleotide
  Category: Target Sequence
  Description: MG31-1 Target Loci 12
atcataagaagttagcttgacgca

SEQ ID NO: 3938 - protein, 7 aa, Simian virus 40
  Category: NLS
  Description: SV40
PKKKRKV

SEQ ID NO: 3939 - protein, 16 aa, Unknown
  Description of Unknown: nucleoplasmin bipartite NLS sequence
  Category: NLS
  Description: nucleoplasmin bipartite NLS
KRPAATKKAGQAKKKK

SEQ ID NO: 3940 - protein, 9 aa, Unknown
  Description of Unknown: c-myc NLS sequence
  Category: NLS
  Description: c-myc NLS
PAAKRVKLD

SEQ ID NO: 3941 - protein, 11 aa, Unknown
  Description of Unknown: c-myc NLS sequence
  Category: NLS
  Description: c-myc NLS
RQRRNELKRSP

SEQ ID NO: 3942 - protein, 38 aa, Homo sapiens
  Category: NLS
  Description: hRNPA1 M9 NLS
NQSSNFGPMKGGNFGGRSSGPYGGGGQYFAKPRNQGGY

SEQ ID NO: 3943 - protein, 42 aa, Unknown
  Description of Unknown: Importin-alpha IBB domain sequence
  Category: NLS
  Description: Importin-alpha IBB domain
RMRIZFKNKGKDTAELRRRRVEVSVELRKAKKDEQILKRRNV

SEQ ID NO: 3944 - protein, 8 aa, Unknown
  Description of Unknown: Myoma T protein sequence
  Category: NLS
  Description: Myoma T protein
VSRKRPRP

SEQ ID NO: 3945 - protein, 8 aa, Unknown
  Description of Unknown: Myoma T protein sequence
  Category: NLS
  Description: Myoma T protein
PPKKARED

SEQ ID NO: 3946 - protein, 8 aa, Unknown
  Description of Unknown: p53 sequence
  Category: NLS
  Description: p53
PQPKKKPL

SEQ ID NO: 3947 - protein, 12 aa, Mus sp.
  Category: NLS
  Description: mouse c-abl IV
SALIKKKKKMAP

SEQ ID NO: 3948 - protein, 5 aa, Influenza virus
  Category: NLS
  Description: influenza virus NS1
DRLRR

SEQ ID NO: 3949 - protein, 7 aa, Influenza virus
  Category: NLS
  Description: influenza virus NS1
PKQKKRK

SEQ ID NO: 3950 - protein, 10 aa, Hepatitis delta virus
  Category: NLS
  Description: Hepatitis virus delta antigen
RKLKKKIKKL

SEQ ID NO: 3951 - protein, 10 aa, Mus sp.
  Category: NLS
  Description: mouse Mx1 protein
REKKKFLKRR

SEQ ID NO: 3952 - protein, 20 aa, Homo sapiens
  Category: NLS
  Description: human poly(ADP-ribose) polymerase
KRKGDEVDGVDEVAKKKSKK

SEQ ID NO: 3953 - protein, 17 aa, Homo sapiens
  Category: NLS
  Description: steroid hormone receptors (human) glucocorticoid
RKCLQAGMNLEARKTKK

SEQ ID NO: 3954 - DNA, 24 bp, Artificial Sequence
  Description of Artificial Sequence: Synthetic oligonucleotide
  Category: MG29 HEK targeting guides
  Description: MG29-1 guide sequence 1 for targeting Apolipoprotein
ccaggaaagttgatgtggtctgcg

SEQ ID NO: 3955 - DNA, 24 bp, Artificial Sequence
  Description of Artificial Sequence: Synthetic oligonucleotide
  Category: MG29 HEK targeting guides
  Description: MG29-1 guide sequence 1 for targeting HBB_R01
ctagtgaacacagttgtgtcagaa

SEQ ID NO: 3956 - DNA, 24 bp, Artificial Sequence
  Description of Artificial Sequence: Synthetic oligonucleotide
  Category: MG29 HEK targeting guides
  Description: MG29-1 guide sequence 2 for targeting HBB_R01
gtatcaaggttacaagacaggttt

SEQ ID NO: 3957 - DNA, 24 bp, Artificial Sequence
  Description of Artificial Sequence: Synthetic oligonucleotide
  Category: MG29 HEK targeting guides
  Description: MG29-1 guide sequence 3 for targeting HBB_R01
gtggtgaggccctgggcaggttgg

SEQ ID NO: 3958 - DNA, 24 bp, Artificial Sequence
  Description of Artificial Sequence: Synthetic oligonucleotide
  Category: MG29 HEK targeting guides
  Description: MG29-1 guide sequence 4 for targeting HBB_R01
tgtcagaagcaaatgtaagcaata

SEQ ID NO: 3959 - DNA, 24 bp, Artificial Sequence
  Description of Artificial Sequence: Synthetic oligonucleotide
  Category: MG29 HEK targeting guides
  Description: MG29-1 guide sequence 1 for targeting Apolipoprotein
tgtgagggagcaccgttctctaga

SEQ ID NO: 3960 - DNA, 24 bp, Artificial Sequence
  Description of Artificial Sequence: Synthetic oligonucleotide
  Category: MG29 HEK targeting guides
  Description: MG29-1 guide sequence 1 for targeting VEGFA
ccccgcctccgggcgcgggctccg

SEQ ID NO: 3961 - DNA, 24 bp, Artificial Sequence
  Description of Artificial Sequence: Synthetic oligonucleotide
  Category: MG29 HEK targeting guides
  Description: MG29-1 guide sequence 2 for targeting VEGFA
ccgaagcgagaacagcccagaagt

SEQ ID NO: 3962 - DNA, 24 bp, Artificial Sequence
  Description of Artificial Sequence: Synthetic oligonucleotide
  Category: MG29 HEK targeting guides
  Description: MG29-1 guide sequence 3 for targeting VEGFA
ccgcgcggaccacggctcctccga

SEQ ID NO: 3963 - DNA, 24 bp, Artificial Sequence
  Description of Artificial Sequence: Synthetic oligonucleotide
  Category: MG29 HEK targeting guides
  Description: MG29-1 guide sequence 4 for targeting VEGFA
gaagttggacgaaaagtttcagtg

SEQ ID NO: 3964 - DNA, 24 bp, Artificial Sequence
  Description of Artificial Sequence: Synthetic oligonucleotide
  Category: MG29 HEK targeting guides
  Description: MG29-1 guide sequence 5 for targeting VEGFA
gaggcggggtggagggggtcgggg

SEQ ID NO: 3965 - DNA, 24 bp, Artificial Sequence
  Description of Artificial Sequence: Synthetic oligonucleotide
  Category: MG29 HEK targeting guides
  Description: MG29-1 guide sequence 6 for targeting VEGFA
ggcgcgggctccggcccctgcccg

SEQ ID NO: 3966 - DNA, 24 bp, Artificial Sequence
  Description of Artificial Sequence: Synthetic oligonucleotide
  Category: MG31 HEK targeting guides
  Description: MG31-1 guide sequence 1 for targeting Apolipoprotein
atcataagaagttagcttgacgca

SEQ ID NO: 3967 - DNA, 24 bp, Artificial Sequence
  Description of Artificial Sequence: Synthetic oligonucleotide
  Category: MG31 HEK targeting guides
  Description: MG31-1 guide sequence 1 for targeting Albumin
cctaggatgtttgaattttattaa

SEQ ID NO: 3968 - DNA, 24 bp, Artificial Sequence
  Description of Artificial Sequence: Synthetic oligonucleotide
  Category: MG31 HEK targeting guides
  Description: MG29-1, MG31-1 guide sequence 1 for targeting Fibrinogen
ctgaaaggttattgttgtgtttgt

SEQ ID NO: 3969 - DNA, 24 bp, Artificial Sequence
  Description of Artificial Sequence: Synthetic oligonucleotide
  Category: MG31 HEK targeting guides
  Description: MG31-1 guide sequence 1 for targeting Apolipoprotein
cttggaccttgttttgcttactgt

SEQ ID NO: 3970 - DNA, 24 bp, Artificial Sequence
  Description of Artificial Sequence: Synthetic oligonucleotide
  Category: MG31 HEK targeting guides
  Description: MG29-1, MG31-1 guide sequence 2 for targeting Apolipoprotein
ggtagttttctgtggtcctattat

SEQ ID NO: 3971 - DNA, 24 bp, Artificial Sequence
  Description of Artificial Sequence: Synthetic oligonucleotide
  Category: MG31 HEK targeting guides
  Description: MG31-1 guide sequence 1 for targeting Fibrinogen
gtgttagtacagttttgctgaaag

SEQ ID NO: 3972 - DNA, 24 bp, Artificial Sequence
  Description of Artificial Sequence: Synthetic oligonucleotide
  Category: MG31 HEK targeting guides
  Description: MG31-1 guide sequence 2 for targeting Fibrinogen
gttattaatttcttgctacttgtc

SEQ ID NO: 3973 - DNA, 24 bp, Artificial Sequence
  Description of Artificial Sequence: Synthetic oligonucleotide
  Category: MG32 HEK targeting guides
  Description: MG28-1, MG28-1, MG30-1, MG30-1, MG32-1 guide sequence 1 for targeting Fibrinogen
agcaaaactgtactaacactaaaa

SEQ ID NO: 3974 - DNA, 24 bp, Artificial Sequence
  Description of Artificial Sequence: Synthetic oligonucleotide
  Category: MG32 HEK targeting guides
  Description: MG28-1, MG28-1, MG30-1, MG30-1, MG32-1 guide sequence 1 for targeting VEGFA
agtgcgacgccgcgagccccgacc

SEQ ID NO: 3975 - DNA, 24 bp, Artificial Sequence
  Description of Artificial Sequence: Synthetic oligonucleotide
  Category: MG32 HEK targeting guides
  Description: MG28-1, MG30-1, MG32-1 guide sequence 2 for targeting VEGFA
caaagcccattccctctttagcca

SEQ ID NO: 3976 - DNA, 24 bp, Artificial Sequence
  Description of Artificial Sequence: Synthetic oligonucleotide
  Category: MG32 HEK targeting guides
  Description: MG28-1, MG28-1, MG29-1, MG30-1, MG30-1, MG31-1, MG32-1 guide sequence 1 for targeting Albumin
cactttccttagtgcgcaaaagaa

SEQ ID NO: 3977 - DNA, 24 bp, Artificial Sequence
  Description of Artificial Sequence: Synthetic oligonucleotide
  Category: MG32 HEK targeting guides
  Description: MG28-1, MG28-1, MG30-1, MG30-1, MG32-1 guide sequence 1 for targeting VEGFA
cgtccaacttctgggctgttctcg

SEQ ID NO: 3978 - DNA, 24 bp, Artificial Sequence
  Description of Artificial Sequence: Synthetic oligonucleotide
  Category: MG32 HEK targeting guides
  Description: MG28-1, MG30-1, MG32-1 guide sequence 1 for targeting Apolipoprotein
ctaagacaaattttacttggacct

SEQ ID NO: 3979 - DNA, 24 bp, Artificial Sequence
  Description of Artificial Sequence: Synthetic oligonucleotide
  Category: MG32 HEK targeting guides
  Description: MG28-1, MG28-1, MG29-1, MG30-1, MG30-1, MG31-1, MG32-1 guide sequence 1 for targeting VEGFA
gaaagggggtggggggagtttgct

SEQ ID NO: 3980 - DNA, 24 bp, Artificial Sequence
  Description of Artificial Sequence: Synthetic oligonucleotide
  Category: MG32 HEK targeting guides
  Description: MG28-1, MG28-1, MG30-1, MG30-1, MG31-1, MG32-1 guide sequence 2 for targeting VEGFA
gccagagccggggtgtgcagacgg

SEQ ID NO: 3981 - DNA, 24 bp, Artificial Sequence
  Description of Artificial Sequence: Synthetic oligonucleotide
  Category: MG32 HEK targeting guides
  Description: MG28-1, MG28-1, MG29-1, MG30-1, MG30-1, MG31-1, MG32-1 guide sequence 3 for targeting VEGFA
ggaggtcagaaatagggggtccag

SEQ ID NO: 3982 - DNA, 24 bp, Artificial Sequence
  Description of Artificial Sequence: Synthetic oligonucleotide
  Category: MG32 HEK targeting guides
  Description: MG28-1, MG28-1, MG30-1, MG30-1, MG32-1 guide sequence 1 for targeting Albumin
gtatttgtgaagtcttacaaggtt

SEQ ID NO: 3983 - DNA, 24 bp, Artificial Sequence
  Description of Artificial Sequence: Synthetic oligonucleotide
  Category: MG32 HEK targeting guides
  Description: MG28-1, MG28-1, MG29-1, MG30-1, MG30-1, MG31-1, MG32-1 guide sequence 2 for targeting Albumin
tgaagtcttacaaggttatcttat

SEQ ID NO: 3984 - DNA, 24 bp, Artificial Sequence
  Description of Artificial Sequence: Synthetic oligonucleotide
  Category: MG32 HEK targeting guides
  Description: MG28-1, MG30-1, MG32-1 guide sequence 3 for targeting Albumin
ttaataagataaccttgtaagact

SEQ ID NO: 3985 - DNA, 44 bp, Artificial Sequence
  Description of Artificial Sequence: Synthetic oligonucleotide
  Description of Combined DNA/RNA Molecule: Synthetic oligonucleotide
  Category: MG29-1 guide modifications
  Description: MG29-1 guide modification test no. 1
uaauuucuacucuuguagaugaaagggggtggggggagtttgct

SEQ ID NO: 3986 - DNA, 44 bp, Artificial Sequence; identical to SEQ ID NO: 3985
  Description of Artificial Sequence: Synthetic oligonucleotide
  Description of Combined DNA/RNA Molecule: Synthetic oligonucleotide
  Category: MG29-1 guide modifications
  Description: MG29-1 guide modification test no. 2

SEQ ID NO: 3987 - DNA, 44 bp, Artificial Sequence; identical to SEQ ID NO: 3985
  Description of Artificial Sequence: Synthetic oligonucleotide
  Description of Combined DNA/RNA Molecule: Synthetic oligonucleotide
  Category: MG29-1 guide modifications
  Description: MG29-1 guide modification test no. 3

SEQ ID NO: 3988 - DNA, 44 bp, Artificial Sequence; identical to SEQ ID NO: 3985
  Description of Artificial Sequence: Synthetic oligonucleotide
  Description of Combined DNA/RNA Molecule: Synthetic oligonucleotide
  Category: MG29-1 guide modifications
  Description: MG29-1 guide modification test no. 4

SEQ ID NO: 3989 - DNA, 44 bp, Artificial Sequence; identical to SEQ ID NO: 3985
  Description of Artificial Sequence: Synthetic oligonucleotide
  Description of Combined DNA/RNA Molecule: Synthetic oligonucleotide
  Category: MG29-1 guide modifications
  Description: MG29-1 guide modification test no. 5

SEQ ID NO: 3990 - DNA, 45 bp, Artificial Sequence
  Description of Artificial Sequence: Synthetic oligonucleotide
  Description of Combined DNA/RNA Molecule: Synthetic oligonucleotide
  Category: MG29-1 guide modifications
  Description: MG29-1 guide modification test no. 6
cuaauuucuacucuuguagaugaaagggggtggggggagtttgct

SEQ ID NO: 3991 - DNA, 45 bp, Artificial Sequence; identical to SEQ ID NO: 3990
  Description of Artificial Sequence: Synthetic oligonucleotide
  Description of Combined DNA/RNA Molecule: Synthetic oligonucleotide
  Category: MG29-1 guide modifications
  Description: MG29-1 guide modification test no. 7

SEQ ID NO: 3992 - DNA, 44 bp, Artificial Sequence; identical to SEQ ID NO: 3985
  Description of Artificial Sequence: Synthetic oligonucleotide
  Description of Combined DNA/RNA Molecule: Synthetic oligonucleotide
  Category: MG29-1 guide modifications
  Description: MG29-1 guide modification test no. 8

SEQ ID NO: 3993 - DNA, 22 bp, Artificial Sequence
  Description of Artificial Sequence: Synthetic oligonucleotide
  Category: MG29-1 spacer used in sgRNA to target mouse albumin intron 1
  Description: mAlb29-1-1
gtatagcatggtcgagcaggca

SEQ ID NO: 3994 - DNA, 22 bp, Artificial Sequence
  Description of Artificial Sequence: Synthetic oligonucleotide
  Category: MG29-1 spacer used in sgRNA to target mouse albumin intron 1
  Description: mAlb29-1-2
ccgatcgttacaggaaaatctg

SEQ ID NO: 3995 - DNA, 22 bp, Artificial Sequence
  Description of Artificial Sequence: Synthetic oligonucleotide
  Category: MG29-1 spacer used in sgRNA to target mouse albumin intron 1
  Description: mAlb29-1-3
aatttattacggtctcataggg

SEQ ID NO: 3996 - DNA, 22 bp, Artificial Sequence
  Description of Artificial Sequence: Synthetic oligonucleotide
  Category: MG29-1 spacer used in sgRNA to target mouse albumin intron 1
  Description: mAlb29-1-4
ttacggtctcatagggcctgcc

SEQ ID NO: 3997 - DNA, 22 bp, Artificial Sequence
  Description of Artificial Sequence: Synthetic oligonucleotide
  Category: MG29-1 spacer used in sgRNA to target mouse albumin intron 1
  Description: mAlb29-1-5
cctgtaacgatcgggaactggc

SEQ ID NO: 3998 - DNA, 22 bp, Artificial Sequence
  Description of Artificial Sequence: Synthetic oligonucleotide
  Category: MG29-1 spacer used in sgRNA to target mouse albumin intron 1
  Description: mAlb29-1-7
agtatagcatggtcgagcaggc

SEQ ID NO: 3999 - DNA, 22 bp, Artificial Sequence
  Description of Artificial Sequence: Synthetic oligonucleotide
  Category: MG29-1 spacer used in sgRNA to target mouse albumin intron 1
  Description: mAlb29-1-8
ctgtaacgatcgggaactggca

SEQ ID NO: 4000 - DNA, 22 bp, Artificial Sequence
  Description of Artificial Sequence: Synthetic oligonucleotide
  Category: MG29-1 spacer used in sgRNA to target mouse albumin intron 1
  Description: mAlb29-1-9
gatacagttgaatttattacgg

SEQ ID NO: 4001 - DNA, 22 bp, Artificial Sequence
  Description of Artificial Sequence: Synthetic oligonucleotide
  Category: MG29-1 spacer used in sgRNA to target mouse albumin intron 1
  Description: mAlb29-1-10
tagtatagcatggtcgagcagg

SEQ ID NO: 4002 - DNA, 22 bp, Artificial Sequence
  Description of Artificial Sequence: Synthetic oligonucleotide
  Category: MG29-1 spacer used in sgRNA to target mouse albumin intron 1
  Description: mAlb29-1-11
catctgagaacccttaggtggt

SEQ ID NO: 4003 - DNA, 22 bp, Artificial Sequence
  Description of Artificial Sequence: Synthetic oligonucleotide
  Category: MG29-1 spacer used in sgRNA to target mouse albumin intron 1
  Description: mAlb29-1-12
agtgtagcagagaggaaccatt

SEQ ID NO: 4004 - DNA, 22 bp, Artificial Sequence
  Description of Artificial Sequence: Synthetic oligonucleotide
  Category: MG29-1 spacer used in sgRNA to target mouse albumin intron 1
  Description: mAlb29-1-13
ctagtaatggaagcctggtatt

SEQ ID NO: 4005 - DNA, 22 bp, Artificial Sequence
  Description of Artificial Sequence: Synthetic oligonucleotide
  Category: MG29-1 spacer used in sgRNA to target mouse albumin intron 1
  Description: mAlb29-1-14
ggtatctttgatgacaataatg

SEQ ID NO: 4006 - DNA, 22 bp, Artificial Sequence
  Description of Artificial Sequence: Synthetic oligonucleotide
  Category: MG29-1 spacer used in sgRNA to target mouse albumin intron 1
  Description: mAlb29-1-15
tctagtaatggaagcctggtat

SEQ ID NO: 4007 - DNA, 22 bp, Artificial Sequence
  Description of Artificial Sequence: Synthetic oligonucleotide
  Category: MG29-1 spacer used in sgRNA to target mouse albumin intron 1
  Description: mAlb29-1-16
tagtaatggaagcctggtattt

SEQ ID NO: 4008 - DNA, 22 bp, Artificial Sequence
  Description of Artificial Sequence: Synthetic oligonucleotide
  Category: MG29-1 spacer used in sgRNA to target mouse albumin intron 1
  Description: mAlb29-1-17
gtatctttgatgacaataatgg

SEQ ID NO: 4009 - DNA, 22 bp, Artificial Sequence
  Description of Artificial Sequence: Synthetic oligonucleotide
  Category: MG29-1 spacer used in sgRNA to target mouse albumin intron 1
  Description: mAlb29-1-18
aagattgatgaagacaactaac

SEQ ID NO: 4010 - DNA, 22 bp, Artificial Sequence
  Description of Artificial Sequence: Synthetic oligonucleotide
  Category: MG29-1 spacer used in sgRNA to target mouse albumin intron 1
  Description: mAlb29-1-19
ctctctgctacactcaaagtta

SEQ ID NO: 4011 - DNA, 22 bp, Artificial Sequence
  Description of Artificial Sequence: Synthetic oligonucleotide
  Category: MG29-1 spacer used in sgRNA to target mouse albumin intron 1
  Description: mAlb29-1-20
aaacccgttaagtgtttatatc

SEQ ID NO: 4012 - DNA, 4 bp, Artificial Sequence
  Description of Artificial Sequence: Synthetic oligonucleotide
  Category: MG29-1 PAM when targeting mouse albumin intron 1
  Description: mAlb29-1-1 PAM
ttta

SEQ ID NO: 4013 - DNA, 4 bp, Artificial Sequence
  Description of Artificial Sequence: Synthetic oligonucleotide
  Category: MG29-1 PAM when targeting mouse albumin intron 1
  Description: mAlb29-1-2 PAM
gttc

SEQ ID NO: 4014 - DNA, 4 bp, Artificial Sequence
  Description of Artificial Sequence: Synthetic oligonucleotide
  Category: MG29-1 PAM when targeting mouse albumin intron 1
  Description: mAlb29-1-3 PAM
gttg

SEQ ID NO: 4015 - DNA, 4 bp, Artificial Sequence
  Description of Artificial Sequence: Synthetic oligonucleotide
  Category: MG29-1 PAM when targeting mouse albumin intron 1
  Description: mAlb29-1-4 PAM
ttta

SEQ ID NO: 4016 - DNA, 4 bp, Artificial Sequence
  Description of Artificial Sequence: Synthetic oligonucleotide
  Category: MG29-1 PAM when targeting mouse albumin intron 1
  Description: mAlb29-1-5 PAM
tttt

SEQ ID NO: 4017 - DNA, 4 bp, Artificial Sequence
  Description of Artificial Sequence: Synthetic oligonucleotide
  Category: MG29-1 PAM when targeting mouse albumin intron 1
  Description: mAlb29-1-7 PAM
tttt

SEQ ID NO: 4018 - DNA, 4 bp, Artificial Sequence
  Description of Artificial Sequence: Synthetic oligonucleotide
  Category: MG29-1 PAM when targeting mouse albumin intron 1
  Description: mAlb29-1-8 PAM
tttc

SEQ ID NO: 4019 - DNA, 4 bp, Artificial Sequence
  Description of Artificial Sequence: Synthetic oligonucleotide
  Category: MG29-1 PAM when targeting mouse albumin intron 1
  Description: mAlb29-1-9 PAM
gttg

SEQ ID NO: 4020 - DNA, 4 bp, Artificial Sequence
  Description of Artificial Sequence: Synthetic oligonucleotide
  Category: MG29-1 PAM when targeting mouse albumin intron 1
  Description: mAlb29-1-10 PAM
tttt

SEQ ID NO: 4021 - DNA, 4 bp, Artificial Sequence
  Description of Artificial Sequence: Synthetic oligonucleotide
  Category: MG29-1 PAM when targeting mouse albumin intron 1
  Description: mAlb29-1-11 PAM
tttg

SEQ ID NO: 4022 - DNA, 4 bp, Artificial Sequence
  Description of Artificial Sequence: Synthetic oligonucleotide
  Category: MG29-1 PAM when targeting mouse albumin intron 1
  Description: mAlb29-1-12 PAM
tttg

SEQ ID NO: 4023 - DNA, 4 bp, Artificial Sequence
  Description of Artificial Sequence: Synthetic oligonucleotide
  Category: MG29-1 PAM when targeting mouse albumin intron 1
  Description: mAlb29-1-13 PAM
tttt

SEQ ID NO: 4024 - DNA, 4 bp, Artificial Sequence
  Description of Artificial Sequence: Synthetic oligonucleotide
  Category: MG29-1 PAM when targeting mouse albumin intron 1
  Description: mAlb29-1-14 PAM
tttt

SEQ ID NO: 4025 - DNA, 4 bp, Artificial Sequence
  Description of Artificial Sequence: Synthetic oligonucleotide
  Category: MG29-1 PAM when targeting mouse albumin intron 1
  Description: mAlb29-1-15 PAM
tttt

SEQ ID NO: 4026 - DNA, 4 bp, Artificial Sequence
  Description of Artificial Sequence: Synthetic oligonucleotide
  Category: MG29-1 PAM when targeting mouse albumin intron 1
  Description: mAlb29-1-16 PAM
tttc

SEQ ID NO: 4027 - DNA, 4 bp, Artificial Sequence
  Description of Artificial Sequence: Synthetic oligonucleotide
  Category: MG29-1 PAM when targeting mouse albumin intron 1
  Description: mAlb29-1-17 PAM
tttg

SEQ ID NO: 4028 - DNA, 4 bp, Artificial Sequence
  Description of Artificial Sequence: Synthetic oligonucleotide
  Category: MG29-1 PAM when targeting mouse albumin intron 1
  Description: mAlb29-1-18 PAM
ttta

SEQ ID NO: 4029 - DNA, 4 bp, Artificial Sequence
  Description of Artificial Sequence: Synthetic oligonucleotide
  Category: MG29-1 PAM when targeting mouse albumin intron 1
  Description: mAlb29-1-19 PAM
gttc

SEQ ID NO: 4030 - DNA, 4 bp, Artificial Sequence
  Description of Artificial Sequence: Synthetic oligonucleotide
  Category: MG29-1 PAM when targeting mouse albumin intron 1
  Description: mAlb29-1-20 PAM
ttta

SEQ ID NO: 4031 - DNA, 18 bp, Artificial Sequence
  Description of Artificial Sequence: Synthetic oligonucleotide
  Category: Primers
  Description: mAlb90F
ctcctcttcgtctccggc

SEQ ID NO: 4032 - DNA, 19 bp, Artificial Sequence
  Description of Artificial Sequence: Synthetic oligonucleotide
  Category: Primers
  Description: mAlb1073R
ctgccacattgctcagcac

SEQ ID NO: 4033 - DNA, 22 bp, Artificial Sequence
  Description of Artificial Sequence: Synthetic oligonucleotide
  Category: MG29-1 spacer used in sgRNA to target human albumin intron 1
  Description: hAlb_g63
gtaaactctgcatctttaaaga

SEQ ID NO: 4034 - DNA, 22 bp, Artificial Sequence
  Description of Artificial Sequence: Synthetic oligonucleotide
  Category: MG29-1 spacer used in sgRNA to target human albumin intron 1
  Description: hAlb_g59
tttcaaaatattgggctctgat

SEQ ID NO: 4035 - DNA, 22 bp, Artificial Sequence
  Description of Artificial Sequence: Synthetic oligonucleotide
  Category: MG29-1 spacer used in sgRNA to target human albumin intron 1
  Description: hAlb_g58
agtaaactctgcatctttaaag

SEQ ID NO: 4036 - DNA, 22 bp, Artificial Sequence
  Description of Artificial Sequence: Synthetic oligonucleotide
  Category: MG29-1 spacer used in sgRNA to target human albumin intron 1
  Description: hAlb_g56
aagatgcagagtttactaaaac

SEQ ID NO: 4037 - DNA, 22 bp, Artificial Sequence
  Description of Artificial Sequence: Synthetic oligonucleotide
  Category: MG29-1 spacer used in sgRNA to target human albumin intron 1
  Description: hAlb_g72
aaaatattgggctctgattcct

SEQ ID NO: 4038 - DNA, 22 bp, Artificial Sequence
  Description of Artificial Sequence: Synthetic oligonucleotide
  Category: MG29-1 spacer used in sgRNA to target human albumin intron 1
  Description: hAlb_g70
aaataaagcatagtgcaatgga

SEQ ID NO: 4039 - DNA, 22 bp, Artificial Sequence
  Description of Artificial Sequence: Synthetic oligonucleotide
  Category: MG29-1 spacer used in sgRNA to target human albumin intron 1
  Description: hAlb_g74
aataaagcatagtgcaatggat

SEQ ID NO: 4040 - DNA, 22 bp, Artificial Sequence
  Description of Artificial Sequence: Synthetic oligonucleotide
  Category: MG29-1 spacer used in sgRNA to target human albumin intron 1
  Description: hAlb_g83
tgagatcaacagcacaggtttt

SEQ ID NO: 4041 - DNA, 22 bp, Artificial Sequence
  Description of Artificial Sequence: Synthetic oligonucleotide
  Category: MG29-1 spacer used in sgRNA to target human albumin intron 1
  Description: hAlb_g85
tgtaggaatcagagcccaatat

SEQ ID NO: 4042 - DNA, 22 bp, Artificial Sequence
  Description of Artificial Sequence: Synthetic oligonucleotide
  Category: MG29-1 spacer used in sgRNA to target human albumin intron 1
  Description: hAlb_g89
ctgtaggaatcagagcccaata

SEQ ID NO: 4043 - DNA, 22 bp, Artificial Sequence
  Description of Artificial Sequence: Synthetic oligonucleotide
  Category: MG29-1 spacer used in sgRNA to target human albumin intron 1
  Description: hAlb_g88
tctgtaggaatcagagcccaat

SEQ ID NO: 4044 - DNA, 22 bp, Artificial Sequence
  Description of Artificial Sequence: Synthetic oligonucleotide
  Category: MG29-1 spacer used in sgRNA to target human albumin intron 1
  Description: hAlb_g77
gtgactgtaattttcttttgcg

SEQ ID NO: 4045 - DNA, 22 bp, Artificial Sequence
  Description of Artificial Sequence: Synthetic oligonucleotide
  Category: MG29-1 spacer used in sgRNA to target human albumin intron 1
  Description: hAlb_g69
cttttgcgcactaaggaaagtg

SEQ ID NO: 4046 - DNA, 22 bp, Artificial Sequence
  Description of Artificial Sequence: Synthetic oligonucleotide
  Category: MG29-1 spacer used in sgRNA to target human albumin intron 1
  Description: hAlb_g66
tgaagtcttacaaggttatctt

SEQ ID NO: 4047 - DNA, 22 bp, Artificial Sequence
  Description of Artificial Sequence: Synthetic oligonucleotide
  Category: MG29-1 spacer used in sgRNA to target human albumin intron 1
  Description: hAlb_g75
agtgtctatcaacagcaaccaa

SEQ ID NO: 4048 - DNA, 22 bp, Artificial Sequence
  Description of Artificial Sequence: Synthetic oligonucleotide
  Category: MG29-1 spacer used in sgRNA to target human albumin intron 1
  Description: hAlb_g79
cttagtgcgcaaaagaaaatta

SEQ ID NO: 4049 - DNA, 22 bp, Artificial Sequence
  Description of Artificial Sequence: Synthetic oligonucleotide
  Category: MG29-1 spacer used in sgRNA to target human albumin intron 1
  Description: hAlb_g82
tagccttatattcaaacttaga

SEQ ID NO: 4050 - DNA, 22 bp, Artificial Sequence
  Description of Artificial Sequence: Synthetic oligonucleotide
  Category: MG29-1 spacer used in sgRNA to target human albumin intron 1
  Description: hAlb_g80
ggatagttatgaattcaatctt

SEQ ID NO: 4051 - DNA, 22 bp, Artificial Sequence
  Description of Artificial Sequence: Synthetic oligonucleotide
  Category: MG29-1 spacer used in sgRNA to target human albumin intron 1
  Description: hAlb_g84
cactttccttagtgcgcaaaag

SEQ ID NO: 4052 - DNA, 22 bp, Artificial Sequence
  Description of Artificial Sequence: Synthetic oligonucleotide
  Category: MG29-1 spacer used in sgRNA to target human albumin intron 1
  Description: hAlb_g81
gtatttgtgaagtcttacaagg

SEQ ID NO: 4053 - DNA, 22 bp, Artificial Sequence
  Description of Artificial Sequence: Synthetic oligonucleotide
  Category: MG29-1 spacer used in sgRNA to target human albumin intron 1
  Description: hAlb_g90
gtgtctatcaacagcaaccaag

SEQ ID NO: 4054 - DNA, 22 bp, Artificial Sequence
  Description of Artificial Sequence: Synthetic oligonucleotide
  Category: MG29-1 spacer used in sgRNA to target human albumin intron 1
  Description: hAlb_g87
cgcactaaggaaagtgcaaagt

SEQ ID NO: 4055 - DNA, 22 bp, Artificial Sequence
  Description of Artificial Sequence: Synthetic oligonucleotide
  Category: MG29-1 spacer used in sgRNA to target human albumin intron 1
  Description: hAlb_g86
gcgcactaaggaaagtgcaaag

SEQ ID NO: 4056 - DNA, 4 bp, Artificial Sequence
  Description of Artificial Sequence: Synthetic oligonucleotide
  Category: MG29-1 PAM when targeting human albumin intron 1
  Description: hAlb_g63 PAM
ttta

SEQ ID NO: 4057 - DNA, 4 bp, Artificial Sequence
  Description of Artificial Sequence: Synthetic oligonucleotide
  Category: MG29-1 PAM when targeting human albumin intron 1
  Description: hAlb_g59 PAM
tttg

SEQ ID NO: 4058 - DNA, 4 bp, Artificial Sequence
  Description of Artificial Sequence: Synthetic oligonucleotide
  Category: MG29-1 PAM when targeting human albumin intron 1
  Description: hAlb_g58 PAM
tttt

SEQ ID NO: 4059 - DNA, 4 bp, Artificial Sequence
  Description of Artificial Sequence: Synthetic oligonucleotide
  Category: MG29-1 PAM when targeting human albumin intron 1
  Description: hAlb_g56 PAM
ttta

SEQ ID NO: 4060 - DNA, 4 bp, Artificial Sequence
  Description of Artificial Sequence: Synthetic oligonucleotide
  Category: MG29-1 PAM when targeting human albumin intron 1
  Description: hAlb_g72 PAM
tttc

SEQ ID NO: 4061 - DNA, 4 bp, Artificial Sequence
  Description of Artificial Sequence: Synthetic oligonucleotide
  Category: MG29-1 PAM when targeting human albumin intron 1
  Description: hAlb_g70 PAM
tttt

SEQ ID NO: 4062 - DNA, 4 bp, Artificial Sequence
  Description of Artificial Sequence: Synthetic oligonucleotide
  Category: MG29-1 PAM when targeting human albumin intron 1
  Description: hAlb_g74 PAM
ttta

SEQ ID NO: 4063 - DNA, 4 bp, Artificial Sequence
  Description of Artificial Sequence: Synthetic oligonucleotide
  Category: MG29-1 PAM when targeting human albumin intron 1
  Description: hAlb_g83 PAM
ttta

SEQ ID NO: 4064 - DNA, 4 bp, Artificial Sequence
  Description of Artificial Sequence: Synthetic oligonucleotide
  Category: MG29-1 PAM when targeting human albumin intron 1
  Description: hAlb_g85 PAM
tttc

SEQ ID NO: 4065 - DNA, 4 bp, Artificial Sequence
  Description of Artificial Sequence: Synthetic oligonucleotide
  Category: MG29-1 PAM when targeting human albumin intron 1
  Description: hAlb_g89 PAM
tttt

SEQ ID NO: 4066 - DNA, 4 bp, Artificial Sequence
  Description of Artificial Sequence: Synthetic oligonucleotide
  Category: MG29-1 PAM when targeting human albumin intron 1
  Description: hAlb_g88 PAM
tttt

SEQ ID NO: 4067 - DNA, 4 bp, Artificial Sequence
  Description of Artificial Sequence: Synthetic oligonucleotide
  Category: MG29-1 PAM when targeting human albumin intron 1
  Description: hAlb_g77 PAM
ttta

SEQ ID NO: 4068 - DNA, 4 bp, Artificial Sequence
  Description of Artificial Sequence: Synthetic oligonucleotide
  Category: MG29-1 PAM when targeting human albumin intron 1
  Description: hAlb_g69 PAM
tttt

SEQ ID NO: 4069 - DNA, 4 bp, Artificial Sequence
  Description of Artificial Sequence: Synthetic oligonucleotide
  Category: MG29-1 PAM when targeting human albumin intron 1
  Description: hAlb_g66 PAM
tttg

SEQ ID NO: 4070 - DNA, 4 bp, Artificial Sequence
  Description of Artificial Sequence: Synthetic oligonucleotide
  Category: MG29-1 PAM when targeting human albumin intron 1
  Description: hAlb_g75 PAM
tttt

SEQ ID NO: 4071 - DNA, 4 bp, Artificial Sequence
  Description of Artificial Sequence: Synthetic oligonucleotide
  Category: MG29-1 PAM when targeting human albumin intron 1
  Description: hAlb_g79 PAM
tttc

SEQ ID NO: 4072 - DNA, 4 bp, Artificial Sequence
  Description of Artificial Sequence: Synthetic oligonucleotide
  Category: MG29-1 PAM when targeting human albumin intron 1
  Description: hAlb_g82 PAM
ttta

SEQ ID NO: 4073 - DNA, 4 bp, Artificial Sequence
  Description of Artificial Sequence: Synthetic oligonucleotide
  Category: MG29-1 PAM when targeting human albumin intron 1
  Description: hAlb_g80 PAM
tttg

SEQ ID NO: 4074 - DNA, 4 bp, Artificial Sequence
  Description of Artificial Sequence: Synthetic oligonucleotide
  Category: MG29-1 PAM when targeting human albumin intron 1
  Description: hAlb_g84 PAM
tttg

SEQ ID NO: 4075 - DNA, 4 bp, Artificial Sequence
  Description of Artificial Sequence: Synthetic oligonucleotide
  Category: MG29-1 PAM when targeting human albumin intron 1
  Description: hAlb_g81 PAM
tttt

SEQ ID NO: 4076 - DNA, 4 bp, Artificial Sequence
  Description of Artificial Sequence: Synthetic oligonucleotide
  Category: MG29-1 PAM when targeting human albumin intron 1
  Description: hAlb_g90 PAM
ttta

SEQ ID NO: 4077 - DNA, 4 bp, Artificial Sequence
  Description of Artificial Sequence: Synthetic oligonucleotide
  Category: MG29-1 PAM when targeting human albumin intron 1
  Description: hAlb_g87 PAM
tttg

SEQ ID NO: 4078 - DNA, 4 bp, Artificial Sequence
  Description of Artificial Sequence: Synthetic oligonucleotide
  Category: MG29-1 PAM when targeting human albumin intron 1
  Description: hAlb_g86 PAM
tttt

SEQ ID NO: 4079 - DNA, 22 bp, Artificial Sequence
  Description of Artificial Sequence: Synthetic oligonucleotide
  Category: Primers
  Description: hAlb 11F
tcttctgtcaaccccacacgcc

SEQ ID NO: 4080 - DNA, 20 bp, Artificial Sequence
  Description of Artificial Sequence: Synthetic oligonucleotide
  Category: Primers
  Description: hAlb834R
cttgtctgggcaagggaaga

SEQ ID NO: 4081 - DNA, 22 bp, Artificial Sequence
  Description of Artificial Sequence: Synthetic oligonucleotide
  Category: MG29-1 spacer used in sgRNA to target mouse hao-1 exons 1 to 4
  Description: mH29-1
ccccagacctgtaatagtcata

SEQ ID NO: 4082 - DNA, 22 bp, Artificial Sequence
  Description of Artificial Sequence: Synthetic oligonucleotide
  Category: MG29-1 spacer used in sgRNA to target mouse hao-1 exons 1 to 4
  Description: mH29-2
aggacagagagtcagcatgcca

SEQ ID NO: 4083 - DNA, 22 bp, Artificial Sequence
  Description of Artificial Sequence: Synthetic oligonucleotide
  Category: MG29-1 spacer used in sgRNA to target mouse hao-1 exons 1 to 4
  Description: mH29-3
ggagacaacagtggacttgctg

SEQ ID NO: 4084 - DNA, 22 bp, Artificial Sequence
  Description of Artificial Sequence: Synthetic oligonucleotide
  Category: MG29-1 spacer used in sgRNA to target mouse hao-1 exons 1 to 4
  Description: mH29-4
ccctaccctgccacaatgttgc

SEQ ID NO: 4085 - DNA, 22 bp, Artificial Sequence
  Description of Artificial Sequence: Synthetic oligonucleotide
  Category: MG29-1 spacer used in sgRNA to target mouse hao-1 exons 1 to 4
  Description: mH29-5
cttacctagaaaatgcttggat

SEQ ID NO: 4086 - DNA, 22 bp, Artificial Sequence
  Description of Artificial Sequence: Synthetic oligonucleotide
  Category: MG29-1 spacer used in sgRNA to target mouse hao-1 exons 1 to 4
  Description: mH29-6
acagatcgatatcagcaacgtt

SEQ ID NO: 4087 - DNA, 22 bp, Artificial Sequence
  Description of Artificial Sequence: Synthetic oligonucleotide
  Category: MG29-1 spacer used in sgRNA to target mouse hao-1 exons 1 to 4
  Description: mH29-7
cgaagcatccgtggatagagct

SEQ ID NO: 4088 - DNA, 22 bp, Artificial Sequence
  Description of Artificial Sequence: Synthetic oligonucleotide
  Category: MG29-1 spacer used in sgRNA to target mouse hao-1 exons 1 to 4
  Description: mH29-8
ttgggctacctcctcaatagaa

SEQ ID NO: 4089 - DNA, 22 bp, Artificial Sequence
  Description of Artificial Sequence: Synthetic oligonucleotide
  Category: MG29-1 spacer used in sgRNA to target mouse hao-1 exons 1 to 4
  Description: mH29-9
aagctgccaccacaactcaggt

SEQ ID NO: 4090 - DNA, 22 bp, Artificial Sequence
  Description of Artificial Sequence: Synthetic oligonucleotide
  Category: MG29-1 spacer used in sgRNA to target mouse hao-1 exons 1 to 4
  Description: mH29-10
tggtggcagcttgaacctgttc

SEQ ID NO: 4091 - DNA, 22 bp, Artificial Sequence
  Description of Artificial Sequence: Synthetic oligonucleotide
  Category: MG29-1 spacer used in sgRNA to target mouse hao-1 exons 1 to 4
  Description: mH29-11
cgcacgtcatcaatgcggttgc

SEQ ID NO: 4092 - DNA, 22 bp, Artificial Sequence
  Description of Artificial Sequence: Synthetic oligonucleotide
  Category: MG29-1 spacer used in sgRNA to target mouse hao-1 exons 1 to 4
  Description: mH29-12
cccaggtaaggggtgtccacag

SEQ ID NO: 4093 - DNA, 22 bp, Artificial Sequence
  Description of Artificial Sequence: Synthetic oligonucleotide
  Category: MG29-1 spacer used in sgRNA to target mouse hao-1 exons 1 to 4
  Description: mH29-13
catccagcgaagtgcctctggg

SEQ ID NO: 4094 - DNA, 22 bp, Artificial Sequence
  Description of Artificial Sequence: Synthetic oligonucleotide
  Category: MG29-1 spacer used in sgRNA to target mouse hao-1 exons 1 to 4
  Description: mH29-14
aaattccagatggaagctctat

SEQ ID NO: 4095 - DNA, 22 bp, Artificial Sequence
  Description of Artificial Sequence: Synthetic oligonucleotide
  Category: MG29-1 spacer used in sgRNA to target mouse hao-1 exons 1 to 4
  Description: mH29-15
tgactgtggacaccccttacct

SEQ ID NO: 4096 - DNA, 22 bp, Artificial Sequence
  Description of Artificial Sequence: Synthetic oligonucleotide
  Category: MG29-1 spacer used in sgRNA to target mouse hao-1 exons 1 to 4
  Description: mH29-16
attacagcctgtcagaccatgg

SEQ ID NO: 4097 - DNA, 22 bp, Artificial Sequence
  Description of Artificial Sequence: Synthetic oligonucleotide
  Category: MG29-1 spacer used in sgRNA to target mouse hao-1 exons 1 to 4
  Description: mH29-17
gagacaacagtggacttgctga

SEQ ID NO: 4098 - DNA, 22 bp, Artificial Sequence
  Description of Artificial Sequence: Synthetic oligonucleotide
  Category: MG29-1 spacer used in sgRNA to target mouse hao-1 exons 1 to 4
  Description: mH29-18
caacaataggcagtgatgtcaa

SEQ ID NO: 4099 - DNA, 22 bp, Artificial Sequence
  Description of Artificial Sequence: Synthetic oligonucleotide
  Category: MG29-1 spacer used in sgRNA to target mouse hao-1 exons 1 to 4
  Description: mH29-19
cctcgactggtctgcatcagtg

SEQ ID NO: 4100 - DNA, 22 bp, Artificial Sequence
  Description of Artificial Sequence: Synthetic oligonucleotide
  Category: MG29-1 spacer used in sgRNA to target mouse hao-1 exons 1 to 4
  Description: mH29-20
ataatcactgatgcagaccagt

SEQ ID NO: 4101 - DNA, 22 bp, Artificial Sequence
  Description of Artificial Sequence: Synthetic oligonucleotide
  Category: MG29-1 spacer used in sgRNA to target mouse hao-1 exons 1 to 4
  Description: mH29-21
tcagctaacgtctcctgatcat

SEQ ID NO: 4102 - DNA, 22 bp, Artificial Sequence
  Description of Artificial Sequence: Synthetic oligonucleotide
  Category: MG29-1 spacer used in sgRNA to target mouse hao-1 exons 1 to 4
  Description: mH29-22
ctgatatcgatctgtcaacttc

SEQ ID NO: 4103 - DNA, 22 bp, Artificial Sequence
  Description of Artificial Sequence: Synthetic oligonucleotide
  Category: MG29-1 spacer used in sgRNA to target mouse hao-1 exons 1 to 4
  Description: mH29-23
taaagggcattttgagaggttt

SEQ ID NO: 4104 - DNA, 22 bp, Artificial Sequence
  Description of Artificial Sequence: Synthetic oligonucleotide
  Category: MG29-1 spacer used in sgRNA to target mouse hao-1 exons 1 to 4
  Description: mH29-24
aatagcaaagtttcttacctag

SEQ ID NO: 4105 - DNA, 22 bp, Artificial Sequence
  Description of Artificial Sequence: Synthetic oligonucleotide
  Category: MG29-1 spacer used in sgRNA to target mouse hao-1 exons 1 to 4
  Description: mH29-25
ggacagagagtcagcatgccaa

SEQ ID NO: 4106 - DNA, 22 bp, Artificial Sequence
  Description of Artificial Sequence: Synthetic oligonucleotide
  Category: MG29-1 spacer used in sgRNA to target mouse hao-1 exons 1 to 4
  Description: mH29-26
tccatttcattacagcctgtca

SEQ ID NO: 4107 - DNA, 22 bp, Artificial Sequence
  Description of Artificial Sequence: Synthetic oligonucleotide
  Category: MG29-1 spacer used in sgRNA to target mouse hao-1 exons 1 to 4
  Description: mH29-27
agtctgtgagatcatactgacc

SEQ ID NO: 4108 - DNA, 22 bp, Artificial Sequence
  Description of Artificial Sequence: Synthetic oligonucleotide
  Category: MG29-1 spacer used in sgRNA to target mouse hao-1 exons 1 to 4
  Description: mH29-28
tagatgtacagttgcatccagc

SEQ ID NO: 4109 - DNA, 22 bp, Artificial Sequence
  Description of Artificial Sequence: Synthetic oligonucleotide
  Category: MG29-1 spacer used in sgRNA to target mouse hao-1 exons 1 to 4
  Description: mH29-29
ccttaggagaaaatgccaaatc

SEQ ID NO: 4110 - DNA, 22 bp, Artificial Sequence
  Description of Artificial Sequence: Synthetic oligonucleotide
  Category: MG29-1 spacer used in sgRNA to target mouse hao-1 exons 1 to 4
  Description: mH29-30
ctcctaagggaaattttggaga

SEQ ID NO: 4111 - DNA, 22 bp, Artificial Sequence
  Description of Artificial Sequence: Synthetic oligonucleotide
  Category: MG29-1 spacer used in sgRNA to target mouse hao-1 exons 1 to 4
  Description: mH29-31
gctgataacatccaagcatttt

SEQ ID NO: 4112 - DNA, 22 bp, Artificial Sequence
  Description of Artificial Sequence: Synthetic oligonucleotide
  Category: MG29-1 spacer used in sgRNA to target mouse hao-1 exons 1 to 4
  Description: mH29-32
aaatagcaaagtttcttaccta

SEQ ID NO: 4113 - DNA, 22 bp, Artificial Sequence
  Description of Artificial Sequence: Synthetic oligonucleotide
  Category: MG29-1 spacer used in sgRNA to target mouse hao-1 exons 1 to 4
  Description: mH29-33
taggacagagagtcagcatgcc

SEQ ID NO: 4114 - DNA, 22 bp, Artificial Sequence
  Description of Artificial Sequence: Synthetic oligonucleotide
  Category: MG29-1 spacer used in sgRNA to target mouse hao-1 exons 1 to 4
  Description: mH29-34
gggctactgccatgcagtgcat

SEQ ID NO: 4115 - DNA, 22 bp, Artificial Sequence
  Description of Artificial Sequence: Synthetic oligonucleotide
  Category: MG29-1 spacer used in sgRNA to target mouse hao-1 exons 1 to 4
  Description: mH29-35
tctccaaaatttcccttaggag

SEQ ID NO: 4116 - DNA, 22 bp, Artificial Sequence
  Description of Artificial Sequence: Synthetic oligonucleotide
  Category: MG29-1 spacer used in sgRNA to target mouse hao-1 exons 1 to 4
  Description: mH29-36
aattccagatggaagctctatc

SEQ ID NO: 4117 - DNA, 22 bp, Artificial Sequence
  Description of Artificial Sequence: Synthetic oligonucleotide
  Category: MG29-1 spacer used in sgRNA to target mouse hao-1 exons 1 to 4
  Description: mH29-37
tcctaagggaaattttggagac

SEQ ID NO: 4118 - DNA, 22 bp, Artificial Sequence
  Description of Artificial Sequence: Synthetic oligonucleotide
  Category: MG29-1 spacer used in sgRNA to target mouse hao-1 exons 1 to 4
  Description: mH29-38
ttacctagaaaatgcttggatg

SEQ ID NO: 4119 - DNA, 22 bp, Artificial Sequence
  Description of Artificial Sequence: Synthetic oligonucleotide
  Category: MG29-1 spacer used in sgRNA to target mouse hao-1 exons 1 to 4
  Description: mH29-39
caaggccatatttgtgactgtg

SEQ ID NO: 4120 - DNA, 22 bp, Artificial Sequence
  Description of Artificial Sequence: Synthetic oligonucleotide
  Category: MG29-1 spacer used in sgRNA to target mouse hao-1 exons 1 to 4
  Description: mH29-40
ctccatttcattacagcctgtc

SEQ ID NO: 4121 - DNA, 22 bp, Artificial Sequence
  Description of Artificial Sequence: Synthetic oligonucleotide
  Category: MG29-1 spacer used in sgRNA to target mouse hao-1 exons 1 to 4
  Description: mH29-41
gcattttctcctaagggaaatt

SEQ ID NO: 4122 - DNA, 22 bp, Artificial Sequence
  Description of Artificial Sequence: Synthetic oligonucleotide
  Category: MG29-1 spacer used in sgRNA to target mouse hao-1 exons 1 to 4
  Description: mH29-42
ttacctcgcacagtggccagct

SEQ ID NO: 4123 - DNA, 22 bp, Artificial Sequence
  Description of Artificial Sequence: Synthetic oligonucleotide
  Category: MG29-1 spacer used in sgRNA to target mouse hao-1 exons 1 to 4
  Description: mH29-43
tctctcttttcttacctcgcac

SEQ ID NO: 4124 - DNA, 22 bp, Artificial Sequence
  Description of Artificial Sequence: Synthetic oligonucleotide
  Category: MG29-1 spacer used in sgRNA to target mouse hao-1 exons 1 to 4
  Description: mH29-44
cttacctcgcacagtggccagc

SEQ ID NO: 4125 - DNA, 22 bp, Artificial Sequence
  Description of Artificial Sequence: Synthetic oligonucleotide
  Category: MG29-1 spacer used in sgRNA to target mouse hao-1 exons 1 to 4
  Description: mH29-45
aaaccaatgatttggcattttc

SEQ ID NO: 4126 - DNA, 4 bp, Artificial Sequence
  Description of Artificial Sequence: Synthetic oligonucleotide
  Category: MG29-1 PAM used in sgRNA to target mouse hao-1 exons 1 to 4
  Description: mH29-1 PAM
tttg

SEQ ID NO: 4127 - DNA, 4 bp, Artificial Sequence
  Description of Artificial Sequence: Synthetic oligonucleotide
  Category: MG29-1 PAM used in sgRNA to target mouse hao-1 exons 1 to 4
  Description: mH29-2 PAM
tttt

SEQ ID NO: 4128 - DNA, 4 bp, Artificial Sequence
  Description of Artificial Sequence: Synthetic oligonucleotide
  Category: MG29-1 PAM used in sgRNA to target mouse hao-1 exons 1 to 4
  Description: mH29-3 PAM
tttt

SEQ ID NO: 4129 - DNA, 4 bp, Artificial Sequence
  Description of Artificial Sequence: Synthetic oligonucleotide
  Category: MG29-1 PAM used in sgRNA to target mouse hao-1 exons 1 to 4
  Description: mH29-4 PAM
gttg

SEQ ID NO: 4130 - DNA, 4 bp, Artificial Sequence
  Description of Artificial Sequence: Synthetic oligonucleotide
  Category: MG29-1 PAM used in sgRNA to target mouse hao-1 exons 1 to 4
  Description: mH29-5 PAM
gttt

SEQ ID NO: 4131 - DNA, 4 bp, Artificial Sequence
  Description of Artificial Sequence: Synthetic oligonucleotide
  Category: MG29-1 PAM used in sgRNA to target mouse hao-1 exons 1 to 4
  Description: mH29-6 PAM
gttg

SEQ ID NO: 4132 - DNA, 4 bp, Artificial Sequence
  Description of Artificial Sequence: Synthetic oligonucleotide
  Category: MG29-1 PAM used in sgRNA to target mouse hao-1 exons 1 to 4
  Description: mH29-7 PAM
gttg

SEQ ID NO: 4133 - DNA, 4 bp, Artificial Sequence
  Description of Artificial Sequence: Synthetic oligonucleotide
  Category: MG29-1 PAM used in sgRNA to target mouse hao-1 exons 1 to 4
  Description: mH29-8 PAM
gttc

SEQ ID NO: 4134 - DNA, 4 bp, Artificial Sequence
  Description of Artificial Sequence: Synthetic oligonucleotide
  Category: MG29-1 PAM used in sgRNA to target mouse hao-1 exons 1 to 4
  Description: mH29-9 PAM
gttc

SEQ ID NO: 4135 - DNA, 4 bp, Artificial Sequence
  Description of Artificial Sequence: Synthetic oligonucleotide
  Category: MG29-1 PAM used in sgRNA to target mouse hao-1 exons 1 to 4
  Description: mH29-10 PAM
gttg

SEQ ID NO: 4136 - DNA, 4 bp, Artificial Sequence
  Description of Artificial Sequence: Synthetic oligonucleotide
  Category: MG29-1 PAM used in sgRNA to target mouse hao-1 exons 1 to 4
  Description: mH29-11 PAM
gttc

SEQ ID NO: 4137 - DNA, 4 bp, Artificial Sequence
  Description of Artificial Sequence: Synthetic oligonucleotide
  Category: MG29-1 PAM used in sgRNA to target mouse hao-1 exons 1 to 4
  Description: mH29-12 PAM
gttg

SEQ ID NO: 4138 - DNA, 4 bp, Artificial Sequence
  Description of Artificial Sequence: Synthetic oligonucleotide
  Category: MG29-1 PAM used in sgRNA to target mouse hao-1 exons 1 to 4
  Description: mH29-13 PAM
gttg

SEQ ID NO: 4139 - DNA, 4 bp, Artificial Sequence
  Description of Artificial Sequence: Synthetic oligonucleotide
  Category: MG29-1 PAM used in sgRNA to target mouse hao-1 exons 1 to 4
  Description: mH29-14 PAM
tttt

SEQ ID NO: 4140 - DNA, 4 bp, Artificial Sequence
  Description of Artificial Sequence: Synthetic oligonucleotide
  Category: MG29-1 PAM used in sgRNA to target mouse hao-1 exons 1 to 4
  Description: mH29-15 PAM
tttg

SEQ ID NO: 4141 - DNA, 4 bp, Artificial Sequence
  Description of Artificial Sequence: Synthetic oligonucleotide
  Category: MG29-1 PAM used in sgRNA to target mouse hao-1 exons 1 to 4
  Description: mH29-16 PAM
tttc

SEQ ID NO: 4142 - DNA, 4 bp, Artificial Sequence
  Description of Artificial Sequence: Synthetic oligonucleotide
  Category: MG29-1 PAM used in sgRNA to target mouse hao-1 exons 1 to 4
  Description: mH29-17PAM
tttg

SEQ ID NO: 4143 - DNA, 4 bp, Artificial Sequence
  Description of Artificial Sequence: Synthetic oligonucleotide
  Category: MG29-1 PAM used in sgRNA to target mouse hao-1 exons 1 to 4
  Description: mH29-18 PAM
ttta

SEQ ID NO: 4144 - DNA, 4 bp, Artificial Sequence
  Description of Artificial Sequence: Synthetic oligonucleotide
  Category: MG29-1 PAM used in sgRNA to target mouse hao-1 exons 1 to 4
  Description: mH29-19 PAM
gttg

SEQ ID NO: 4145 - DNA, 4 bp, Artificial Sequence
  Description of Artificial Sequence: Synthetic oligonucleotide
  Category: MG29-1 PAM used in sgRNA to target mouse hao-1 exons 1 to 4
  Description: mH29-20 PAM
gttc

SEQ ID NO: 4146 - DNA, 4 bp, Artificial Sequence
  Description of Artificial Sequence: Synthetic oligonucleotide
  Category: MG29-1 PAM used in sgRNA to target mouse hao-1 exons 1 to 4
  Description: mH29-21 PAM
gtta

SEQ ID NO: 4147 - DNA, 4 bp, Artificial Sequence
  Description of Artificial Sequence: Synthetic oligonucleotide
  Category: MG29-1 PAM used in sgRNA to target mouse hao-1 exons 1 to 4
  Description: mH29-22 PAM
gttg

SEQ ID NO: 4148 - DNA, 4 bp, Artificial Sequence
  Description of Artificial Sequence: Synthetic oligonucleotide
  Category: MG29-1 PAM used in sgRNA to target mouse hao-1 exons 1 to 4
  Description: mH29-23 PAM
gttg

SEQ ID NO: 4149 - DNA, 4 bp, Artificial Sequence
  Description of Artificial Sequence: Synthetic oligonucleotide
  Category: MG29-1 PAM used in sgRNA to target mouse hao-1 exons 1 to 4
  Description: mH29-24 PAM
ttta

SEQ ID NO: 4150 - DNA, 4 bp, Artificial Sequence
  Description of Artificial Sequence: Synthetic oligonucleotide
  Category: MG29-1 PAM used in sgRNA to target mouse hao-1 exons 1 to 4
  Description: mH29-25 PAM
ttta

SEQ ID NO: 4151 - DNA, 4 bp, Artificial Sequence
  Description of Artificial Sequence: Synthetic oligonucleotide
  Category: MG29-1 PAM used in sgRNA to target mouse hao-1 exons 1 to 4
  Description: mH29-26 PAM
tttc

SEQ ID NO: 4152 - DNA, 4 bp, Artificial Sequence
  Description of Artificial Sequence: Synthetic oligonucleotide
  Category: MG29-1 PAM used in sgRNA to target mouse hao-1 exons 1 to 4
  Description: mH29-27 PAM
tttg

SEQ ID NO: 4153 - DNA, 4 bp, Artificial Sequence
  Description of Artificial Sequence: Synthetic oligonucleotide
  Category: MG29-1 PAM used in sgRNA to target mouse hao-1 exons 1 to 4
  Description: mH29-28 PAM
tttg

SEQ ID NO: 4154 - DNA, 4 bp, Artificial Sequence
  Description of Artificial Sequence: Synthetic oligonucleotide
  Category: MG29-1 PAM used in sgRNA to target mouse hao-1 exons 1 to 4
  Description: mH29-29 PAM
tttc

SEQ ID NO: 4155 - DNA, 4 bp, Artificial Sequence
  Description of Artificial Sequence: Synthetic oligonucleotide
  Category: MG29-1 PAM used in sgRNA to target mouse hao-1 exons 1 to 4
  Description: mH29-30 PAM
tttt

SEQ ID NO: 4156 - DNA, 4 bp, Artificial Sequence
  Description of Artificial Sequence: Synthetic oligonucleotide
  Category: MG29-1 PAM used in sgRNA to target mouse hao-1 exons 1 to 4
  Description: mH29-31 PAM
gtta

SEQ ID NO: 4157 - DNA, 4 bp, Artificial Sequence
  Description of Artificial Sequence: Synthetic oligonucleotide
  Category: MG29-1 PAM used in sgRNA to target mouse hao-1 exons 1 to 4
  Description: mH29-32 PAM
gttt

SEQ ID NO: 4158 - DNA, 4 bp, Artificial Sequence
  Description of Artificial Sequence: Synthetic oligonucleotide
  Category: MG29-1 PAM used in sgRNA to target mouse hao-1 exons 1 to 4
  Description: mH29-33 PAM
gttt

SEQ ID NO: 4159 - DNA, 4 bp, Artificial Sequence
  Description of Artificial Sequence: Synthetic oligonucleotide
  Category: MG29-1 PAM used in sgRNA to target mouse hao-1 exons 1 to 4
  Description: mH29-34 PAM
gttg

SEQ ID NO: 4160 - DNA, 4 bp, Artificial Sequence
  Description of Artificial Sequence: Synthetic oligonucleotide
  Category: MG29-1 PAM used in sgRNA to target mouse hao-1 exons 1 to 4
  Description: mH29-35 PAM
gttg

SEQ ID NO: 4161 - DNA, 4 bp, Artificial Sequence
  Description of Artificial Sequence: Synthetic oligonucleotide
  Category: MG29-1 PAM used in sgRNA to target mouse hao-1 exons 1 to 4
  Description: mH29-36 PAM
ttta

SEQ ID NO: 4162 - DNA, 4 bp, Artificial Sequence
  Description of Artificial Sequence: Synthetic oligonucleotide
  Category: MG29-1 PAM used in sgRNA to target mouse hao-1 exons 1 to 4
  Description: mH29-37 PAM
tttc

SEQ ID NO: 4163 - DNA, 4 bp, Artificial Sequence
  Description of Artificial Sequence: Synthetic oligonucleotide
  Category: MG29-1 PAM used in sgRNA to target mouse hao-1 exons 1 to 4
  Description: mH29-38 PAM
tttc

SEQ ID NO: 4164 - DNA, 4 bp, Artificial Sequence
  Description of Artificial Sequence: Synthetic oligonucleotide
  Category: MG29-1 PAM used in sgRNA to target mouse hao-1 exons 1 to 4
  Description: mH29-39 PAM
gtta

SEQ ID NO: 4165 - DNA, 4 bp, Artificial Sequence
  Description of Artificial Sequence: Synthetic oligonucleotide
  Category: MG29-1 PAM used in sgRNA to target mouse hao-1 exons 1 to 4
  Description: mH29-40 PAM
tttt

SEQ ID NO: 4166 - DNA, 4 bp, Artificial Sequence
  Description of Artificial Sequence: Synthetic oligonucleotide
  Category: MG29-1 PAM used in sgRNA to target mouse hao-1 exons 1 to 4
  Description: mH29-41 PAM
tttg

SEQ ID NO: 4167 - DNA, 4 bp, Artificial Sequence
  Description of Artificial Sequence: Synthetic oligonucleotide
  Category: MG29-1 PAM used in sgRNA to target mouse hao-1 exons 1 to 4
  Description: mH29-42 PAM
tttc

SEQ ID NO: 4168 - DNA, 4 bp, Artificial Sequence
  Description of Artificial Sequence: Synthetic oligonucleotide
  Category: MG29-1 PAM used in sgRNA to target mouse hao-1 exons 1 to 4
  Description: mH29-43 PAM
tttg

SEQ ID NO: 4169 - DNA, 4 bp, Artificial Sequence
  Description of Artificial Sequence: Synthetic oligonucleotide
  Category: MG29-1 PAM used in sgRNA to target mouse hao-1 exons 1 to 4
  Description: mH29-44 PAM
tttt

SEQ ID NO: 4170 - DNA, 4 bp, Artificial Sequence
  Description of Artificial Sequence: Synthetic oligonucleotide
  Category: MG29-1 PAM used in sgRNA to target mouse hao-1 exons 1 to 4
  Description: mH29-45 PAM
tttg

SEQ ID NO: 4171 - DNA, 20 bp, Artificial Sequence
  Description of Artificial Sequence: Synthetic oligonucleotide
  Category: Primers
  Description: PCR_mHE1_F_+233
gtgaccaaccctacccgttt

SEQ ID NO: 4172 - DNA, 20 bp, Artificial Sequence
  Description of Artificial Sequence: Synthetic oligonucleotide
  Category: Primers
  Description: PCR_mHE1_R_-553
gcaagcacctactgtctcgt

SEQ ID NO: 4173 - DNA, 20 bp, Artificial Sequence
  Description of Artificial Sequence: Synthetic oligonucleotide
  Category: Primers
  Description: HAO1_E2_F5721
caacgaaggttccctccagg

SEQ ID NO: 4174 - DNA, 20 bp, Artificial Sequence
  Description of Artificial Sequence: Synthetic oligonucleotide
  Category: Primers
  Description: HAO1_E2_R6271
ggaagggtgttcgagaagga

SEQ ID NO: 4175 - DNA, 20 bp, Artificial Sequence
  Description of Artificial Sequence: Synthetic oligonucleotide
  Category: Primers
  Description: HAO1_E3_F23198
tgccctagacaagctgacac

SEQ ID NO: 4176 - DNA, 20 bp, Artificial Sequence
  Description of Artificial Sequence: Synthetic oligonucleotide
  Category: Primers
  Description: HAO1_E3_R23879
cagattctggaagtggccca

SEQ ID NO: 4177 - DNA, 20 bp, Artificial Sequence
  Description of Artificial Sequence: Synthetic oligonucleotide
  Category: Primers
  Description: HAO1_E4_F31087
cctgtaggtggctgagtacg

SEQ ID NO: 4178 - DNA, 20 bp, Artificial Sequence
  Description of Artificial Sequence: Synthetic oligonucleotide
  Category: Primers
  Description: HAO1_E4_R31650
aggtttggttcccctcacct

SEQ ID NO: 4179 - DNA, 24 bp, Artificial Sequence
  Description of Artificial Sequence: Synthetic oligonucleotide
  Category: Primers
  Description: Seq_mHE1_F_+139
gtctaggcatacaatgtttgctca

SEQ ID NO: 4180 - DNA, 23 bp, Artificial Sequence
  Description of Artificial Sequence: Synthetic oligonucleotide
  Category: Primers
  Description: 5938F Seq_HAO1_E2
ctatgcaaggaaaagatttggcc

SEQ ID NO: 4181 - DNA, 23 bp, Artificial Sequence
  Description of Artificial Sequence: Synthetic oligonucleotide
  Category: Primers
  Description: HAO1_E3_F23476
tcttcccccttgaatgaaacact

SEQ ID NO: 4182 - DNA, 20 bp, Artificial Sequence
  Description of Artificial Sequence: Synthetic oligonucleotide
  Category: Primers
  Description: HAO1_E3_R23879
cagattctggaagtggccca

SEQ ID NO: 4183 - DNA, 20 bp, Artificial Sequence
  Description of Artificial Sequence: Synthetic oligonucleotide
  Category: Primers
  Description: HAO1_E4_R31650
aggtttggttcccctcacct

SEQ ID NO: 4184 - DNA, 22 bp, Artificial Sequence
  Description of Artificial Sequence: Synthetic oligonucleotide
  Category: MG29-1 spacer sequences identified in exons 1 to 4 of the human hao-1 gene
  Description: hH29-1
gcatgttgttcataatcattga

SEQ ID NO: 4185 - DNA, 22 bp, Artificial Sequence
  Description of Artificial Sequence: Synthetic oligonucleotide
  Category: MG29-1 spacer sequences identified in exons 1 to 4 of the human hao-1 gene
  Description: hH29-2
gaagtactgatttagcatgttg

SEQ ID NO: 4186 - DNA, 22 bp, Artificial Sequence
  Description of Artificial Sequence: Synthetic oligonucleotide
  Category: MG29-1 spacer sequences identified in exons 1 to 4 of the human hao-1 gene
  Description: hH29-3
tatcaatgattatgaacaacat

SEQ ID NO: 4187 - DNA, 22 bp, Artificial Sequence
  Description of Artificial Sequence: Synthetic oligonucleotide
  Category: MG29-1 spacer sequences identified in exons 1 to 4 of the human hao-1 gene
  Description: hH29-4
ccccagacctgtaatagtcata

SEQ ID NO: 4188 - DNA, 22 bp, Artificial Sequence
  Description of Artificial Sequence: Synthetic oligonucleotide
  Category: MG29-1 spacer sequences identified in exons 1 to 4 of the human hao-1 gene
  Description: hH29-5
ttcatcatttgccccagacctg

SEQ ID NO: 4189 - DNA, 22 bp, Artificial Sequence
  Description of Artificial Sequence: Synthetic oligonucleotide
  Category: MG29-1 spacer sequences identified in exons 1 to 4 of the human hao-1 gene
  Description: hH29-6
ttacctggaaaatgctgcaata

SEQ ID NO: 4190 - DNA, 22 bp, Artificial Sequence
  Description of Artificial Sequence: Synthetic oligonucleotide
  Category: MG29-1 spacer sequences identified in exons 1 to 4 of the human hao-1 gene
  Description: hH29-7
cttacctggaaaatgctgcaat

SEQ ID NO: 4191 - DNA, 22 bp, Artificial Sequence
  Description of Artificial Sequence: Synthetic oligonucleotide
  Category: MG29-1 spacer sequences identified in exons 1 to 4 of the human hao-1 gene
  Description: hH29-8
gctgataatattgcagcatttt

SEQ ID NO: 4192 - DNA, 22 bp, Artificial Sequence
  Description of Artificial Sequence: Synthetic oligonucleotide
  Category: MG29-1 spacer sequences identified in exons 1 to 4 of the human hao-1 gene
  Description: hH29-9
aaaaataaattttcttacctgg

SEQ ID NO: 4193 - DNA, 22 bp, Artificial Sequence
  Description of Artificial Sequence: Synthetic oligonucleotide
  Category: MG29-1 spacer sequences identified in exons 1 to 4 of the human hao-1 gene
  Description: hH29-10
aaaaaataaattttcttacctg

SEQ ID NO: 4194 - DNA, 22 bp, Artificial Sequence
  Description of Artificial Sequence: Synthetic oligonucleotide
  Category: MG29-1 spacer sequences identified in exons 1 to 4 of the human hao-1 gene
  Description: hH29-11
attttattttttaattctagat

SEQ ID NO: 4195 - DNA, 22 bp, Artificial Sequence
  Description of Artificial Sequence: Synthetic oligonucleotide
  Category: MG29-1 spacer sequences identified in exons 1 to 4 of the human hao-1 gene
  Description: hH29-12
ttttattttttaattctagatg

SEQ ID NO: 4196 - DNA, 22 bp, Artificial Sequence
  Description of Artificial Sequence: Synthetic oligonucleotide
  Category: MG29-1 spacer sequences identified in exons 1 to 4 of the human hao-1 gene
  Description: hH29-13
attttttaattctagatggaag

SEQ ID NO: 4197 - DNA, 22 bp, Artificial Sequence
  Description of Artificial Sequence: Synthetic oligonucleotide
  Category: MG29-1 spacer sequences identified in exons 1 to 4 of the human hao-1 gene
  Description: hH29-14
ttttttaattctagatggaagc

SEQ ID NO: 4198 - DNA, 22 bp, Artificial Sequence
  Description of Artificial Sequence: Synthetic oligonucleotide
  Category: MG29-1 spacer sequences identified in exons 1 to 4 of the human hao-1 gene
  Description: hH29-15
ttaattctagatggaagctgta

SEQ ID NO: 4199 - DNA, 22 bp, Artificial Sequence
  Description of Artificial Sequence: Synthetic oligonucleotide
  Category: MG29-1 spacer sequences identified in exons 1 to 4 of the human hao-1 gene
  Description: hH29-16
taattctagatggaagctgtat

SEQ ID NO: 4200 - DNA, 22 bp, Artificial Sequence
  Description of Artificial Sequence: Synthetic oligonucleotide
  Category: MG29-1 spacer sequences identified in exons 1 to 4 of the human hao-1 gene
  Description: hH29-17
aattctagatggaagctgtatc

SEQ ID NO: 4201 - DNA, 22 bp, Artificial Sequence
  Description of Artificial Sequence: Synthetic oligonucleotide
  Category: MG29-1 spacer sequences identified in exons 1 to 4 of the human hao-1 gene
  Description: hH29-18
attctagatggaagctgtatcc

SEQ ID NO: 4202 - DNA, 22 bp, Artificial Sequence
  Description of Artificial Sequence: Synthetic oligonucleotide
  Category: MG29-1 spacer sequences identified in exons 1 to 4 of the human hao-1 gene
  Description: hH29-19
agcaacattccggagcatcctt

SEQ ID NO: 4203 - DNA, 22 bp, Artificial Sequence
  Description of Artificial Sequence: Synthetic oligonucleotide
  Category: MG29-1 spacer sequences identified in exons 1 to 4 of the human hao-1 gene
  Description: hH29-20
aggacagagggtcagcatgcca

SEQ ID NO: 4204 - DNA, 22 bp, Artificial Sequence
  Description of Artificial Sequence: Synthetic oligonucleotide
  Category: MG29-1 spacer sequences identified in exons 1 to 4 of the human hao-1 gene
  Description: hH29-21
ggacagagggtcagcatgccaa

SEQ ID NO: 4205 - DNA, 22 bp, Artificial Sequence
  Description of Artificial Sequence: Synthetic oligonucleotide
  Category: MG29-1 spacer sequences identified in exons 1 to 4 of the human hao-1 gene
  Description: hH29-22
tttctcagcctgtcagtccctg

SEQ ID NO: 4206 - DNA, 22 bp, Artificial Sequence
  Description of Artificial Sequence: Synthetic oligonucleotide
  Category: MG29-1 spacer sequences identified in exons 1 to 4 of the human hao-1 gene
  Description: hH29-23
tcagcctgtcagtccctgggaa

SEQ ID NO: 4207 - DNA, 22 bp, Artificial Sequence
  Description of Artificial Sequence: Synthetic oligonucleotide
  Category: MG29-1 spacer sequences identified in exons 1 to 4 of the human hao-1 gene
  Description: hH29-24
tgacagtggacacaccttacct

SEQ ID NO: 4208 - DNA, 22 bp, Artificial Sequence
  Description of Artificial Sequence: Synthetic oligonucleotide
  Category: MG29-1 spacer sequences identified in exons 1 to 4 of the human hao-1 gene
  Description: hH29-25
aatctgttacgcacatcatcca

SEQ ID NO: 4209 - DNA, 22 bp, Artificial Sequence
  Description of Artificial Sequence: Synthetic oligonucleotide
  Category: MG29-1 spacer sequences identified in exons 1 to 4 of the human hao-1 gene
  Description: hH29-26
atgcatttcttattttaggatg

SEQ ID NO: 4210 - DNA, 22 bp, Artificial Sequence
  Description of Artificial Sequence: Synthetic oligonucleotide
  Category: MG29-1 spacer sequences identified in exons 1 to 4 of the human hao-1 gene
  Description: hH29-27
tgcatttcttattttaggatga

SEQ ID NO: 4211 - DNA, 22 bp, Artificial Sequence
  Description of Artificial Sequence: Synthetic oligonucleotide
  Category: MG29-1 spacer sequences identified in exons 1 to 4 of the human hao-1 gene
  Description: hH29-28
ttattttaggatgaaaaatttt

SEQ ID NO: 4212 - DNA, 22 bp, Artificial Sequence
  Description of Artificial Sequence: Synthetic oligonucleotide
  Category: MG29-1 spacer sequences identified in exons 1 to 4 of the human hao-1 gene
  Description: hH29-29
aggatgaaaaattttgaaacca

SEQ ID NO: 4213 - DNA, 22 bp, Artificial Sequence
  Description of Artificial Sequence: Synthetic oligonucleotide
  Category: MG29-1 spacer sequences identified in exons 1 to 4 of the human hao-1 gene
  Description: hH29-30
ggatgaaaaattttgaaaccag

SEQ ID NO: 4214 - DNA, 22 bp, Artificial Sequence
  Description of Artificial Sequence: Synthetic oligonucleotide
  Category: MG29-1 spacer sequences identified in exons 1 to 4 of the human hao-1 gene
  Description: hH29-31
ctcaggagaaaatgataaagta

SEQ ID NO: 4215 - DNA, 22 bp, Artificial Sequence
  Description of Artificial Sequence: Synthetic oligonucleotide
  Category: MG29-1 spacer sequences identified in exons 1 to 4 of the human hao-1 gene
  Description: hH29-32
cctcaggagaaaatgataaagt

SEQ ID NO: 4216 - DNA, 22 bp, Artificial Sequence
  Description of Artificial Sequence: Synthetic oligonucleotide
  Category: MG29-1 spacer sequences identified in exons 1 to 4 of the human hao-1 gene
  Description: hH29-33
gaaaccagtactttatcatttt

SEQ ID NO: 4217 - DNA, 22 bp, Artificial Sequence
  Description of Artificial Sequence: Synthetic oligonucleotide
  Category: MG29-1 spacer sequences identified in exons 1 to 4 of the human hao-1 gene
  Description: hH29-34
aaaccagtactttatcattttc

SEQ ID NO: 4218 - DNA, 22 bp, Artificial Sequence
  Description of Artificial Sequence: Synthetic oligonucleotide
  Category: MG29-1 spacer sequences identified in exons 1 to 4 of the human hao-1 gene
  Description: hH29-35
tcattttctcctgaggaaaatt

SEQ ID NO: 4219 - DNA, 22 bp, Artificial Sequence
  Description of Artificial Sequence: Synthetic oligonucleotide
  Category: MG29-1 spacer sequences identified in exons 1 to 4 of the human hao-1 gene
  Description: hH29-36
ctcctgaggaaaattttggaga

SEQ ID NO: 4220 - DNA, 22 bp, Artificial Sequence
  Description of Artificial Sequence: Synthetic oligonucleotide
  Category: MG29-1 spacer sequences identified in exons 1 to 4 of the human hao-1 gene
  Description: hH29-37
tcctgaggaaaattttggagac

SEQ ID NO: 4221 - DNA, 22 bp, Artificial Sequence
  Description of Artificial Sequence: Synthetic oligonucleotide
  Category: MG29-1 spacer sequences identified in exons 1 to 4 of the human hao-1 gene
  Description: hH29-38
gccacatatgcagcaagtccac

SEQ ID NO: 4222 - DNA, 22 bp, Artificial Sequence
  Description of Artificial Sequence: Synthetic oligonucleotide
  Category: MG29-1 spacer sequences identified in exons 1 to 4 of the human hao-1 gene
  Description: hH29-39
ggagacgacagtggacttgctg

SEQ ID NO: 4223 - DNA, 22 bp, Artificial Sequence
  Description of Artificial Sequence: Synthetic oligonucleotide
  Category: MG29-1 spacer sequences identified in exons 1 to 4 of the human hao-1 gene
  Description: hH29-40
gagacgacagtggacttgctgc

SEQ ID NO: 4224 - DNA, 22 bp, Artificial Sequence
  Description of Artificial Sequence: Synthetic oligonucleotide
  Category: MG29-1 spacer sequences identified in exons 1 to 4 of the human hao-1 gene
  Description: hH29-41
atatcttcccagctgatagatg

SEQ ID NO: 4225 - DNA, 22 bp, Artificial Sequence
  Description of Artificial Sequence: Synthetic oligonucleotide
  Category: MG29-1 spacer sequences identified in exons 1 to 4 of the human hao-1 gene
  Description: hH29-42
caacaattggcaatgatgtcag

SEQ ID NO: 4226 - DNA, 4 bp, Artificial Sequence
  Description of Artificial Sequence: Synthetic oligonucleotide
  Category: MG29-1 PAM sequences identified in exons 1 to 4 of the human hao-1 gene
  Description: hH29-1 PAM
ttta

SEQ ID NO: 4227 - DNA, 4 bp, Artificial Sequence
  Description of Artificial Sequence: Synthetic oligonucleotide
  Category: MG29-1 PAM sequences identified in exons 1 to 4 of the human hao-1 gene
  Description: hH29-2 PAM
tttg

SEQ ID NO: 4228 - DNA, 4 bp, Artificial Sequence
  Description of Artificial Sequence: Synthetic oligonucleotide
  Category: MG29-1 PAM sequences identified in exons 1 to 4 of the human hao-1 gene
  Description: hH29-3 PAM
tttg

SEQ ID NO: 4229 - DNA, 4 bp, Artificial Sequence
  Description of Artificial Sequence: Synthetic oligonucleotide
  Category: MG29-1 PAM sequences identified in exons 1 to 4 of the human hao-1 gene
  Description: hH29-4 PAM
tttg

SEQ ID NO: 4230 - DNA, 4 bp, Artificial Sequence
  Description of Artificial Sequence: Synthetic oligonucleotide
  Category: MG29-1 PAM sequences identified in exons 1 to 4 of the human hao-1 gene
  Description: hH29-5 PAM
tttc

SEQ ID NO: 4231 - DNA, 4 bp, Artificial Sequence
  Description of Artificial Sequence: Synthetic oligonucleotide
  Category: MG29-1 PAM sequences identified in exons 1 to 4 of the human hao-1 gene
  Description: hH29-6 PAM
tttc

SEQ ID NO: 4232 - DNA, 4 bp, Artificial Sequence
  Description of Artificial Sequence: Synthetic oligonucleotide
  Category: MG29-1 PAM sequences identified in exons 1 to 4 of the human hao-1 gene
  Description: hH29-7 PAM
tttt

SEQ ID NO: 4233 - DNA, 4 bp, Artificial Sequence
  Description of Artificial Sequence: Synthetic oligonucleotide
  Category: MG29-1 PAM sequences identified in exons 1 to 4 of the human hao-1 gene
  Description: hH29-8 PAM
tttg

SEQ ID NO: 4234 - DNA, 4 bp, Artificial Sequence
  Description of Artificial Sequence: Synthetic oligonucleotide
  Category: MG29-1 PAM sequences identified in exons 1 to 4 of the human hao-1 gene
  Description: hH29-9 PAM
ttta

SEQ ID NO: 4235 - DNA, 4 bp, Artificial Sequence
  Description of Artificial Sequence: Synthetic oligonucleotide
  Category: MG29-1 PAM sequences identified in exons 1 to 4 of the human hao-1 gene
  Description: hH29-10 PAM
tttt

SEQ ID NO: 4236 - DNA, 4 bp, Artificial Sequence
  Description of Artificial Sequence: Synthetic oligonucleotide
  Category: MG29-1 PAM sequences identified in exons 1 to 4 of the human hao-1 gene
  Description: hH29-11 PAM
tttt

SEQ ID NO: 4237 - DNA, 4 bp, Artificial Sequence
  Description of Artificial Sequence: Synthetic oligonucleotide
  Category: MG29-1 PAM sequences identified in exons 1 to 4 of the human hao-1 gene
  Description: hH29-12 PAM
ttta

SEQ ID NO: 4238 - DNA, 4 bp, Artificial Sequence
  Description of Artificial Sequence: Synthetic oligonucleotide
  Category: MG29-1 PAM sequences identified in exons 1 to 4 of the human hao-1 gene
  Description: hH29-13 PAM
tttt

SEQ ID NO: 4239 - DNA, 4 bp, Artificial Sequence
  Description of Artificial Sequence: Synthetic oligonucleotide
  Category: MG29-1 PAM sequences identified in exons 1 to 4 of the human hao-1 gene
  Description: hH29-14 PAM
ttta

SEQ ID NO: 4240 - DNA, 4 bp, Artificial Sequence
  Description of Artificial Sequence: Synthetic oligonucleotide
  Category: MG29-1 PAM sequences identified in exons 1 to 4 of the human hao-1 gene
  Description: hH29-15 PAM
tttt

SEQ ID NO: 4241 - DNA, 4 bp, Artificial Sequence
  Description of Artificial Sequence: Synthetic oligonucleotide
  Category: MG29-1 PAM sequences identified in exons 1 to 4 of the human hao-1 gene
  Description: hH29-16 PAM
tttt

SEQ ID NO: 4242 - DNA, 4 bp, Artificial Sequence
  Description of Artificial Sequence: Synthetic oligonucleotide
  Category: MG29-1 PAM sequences identified in exons 1 to 4 of the human hao-1 gene
  Description: hH29-17 PAM
tttt

SEQ ID NO: 4243 - DNA, 4 bp, Artificial Sequence
  Description of Artificial Sequence: Synthetic oligonucleotide
  Category: MG29-1 PAM sequences identified in exons 1 to 4 of the human hao-1 gene
  Description: hH29-18 PAM
ttta

SEQ ID NO: 4244 - DNA, 4 bp, Artificial Sequence
  Description of Artificial Sequence: Synthetic oligonucleotide
  Category: MG29-1 PAM sequences identified in exons 1 to 4 of the human hao-1 gene
  Description: hH29-19 PAM
tttc

SEQ ID NO: 4245 - DNA, 4 bp, Artificial Sequence
  Description of Artificial Sequence: Synthetic oligonucleotide
  Category: MG29-1 PAM sequences identified in exons 1 to 4 of the human hao-1 gene
  Description: hH29-20 PAM
tttt

SEQ ID NO: 4246 - DNA, 4 bp, Artificial Sequence
  Description of Artificial Sequence: Synthetic oligonucleotide
  Category: MG29-1 PAM sequences identified in exons 1 to 4 of the human hao-1 gene
  Description: hH29-21 PAM
ttta

SEQ ID NO: 4247 - DNA, 4 bp, Artificial Sequence
  Description of Artificial Sequence: Synthetic oligonucleotide
  Category: MG29-1 PAM sequences identified in exons 1 to 4 of the human hao-1 gene
  Description: hH29-22 PAM
tttc

SEQ ID NO: 4248 - DNA, 4 bp, Artificial Sequence
  Description of Artificial Sequence: Synthetic oligonucleotide
  Category: MG29-1 PAM sequences identified in exons 1 to 4 of the human hao-1 gene
  Description: hH29-23 PAM
tttc

SEQ ID NO: 4249 - DNA, 4 bp, Artificial Sequence
  Description of Artificial Sequence: Synthetic oligonucleotide
  Category: MG29-1 PAM sequences identified in exons 1 to 4 of the human hao-1 gene
  Description: hH29-24 PAM
tttg

SEQ ID NO: 4250 - DNA, 4 bp, Artificial Sequence
  Description of Artificial Sequence: Synthetic oligonucleotide
  Category: MG29-1 PAM sequences identified in exons 1 to 4 of the human hao-1 gene
  Description: hH29-25 PAM
tttg

SEQ ID NO: 4251 - DNA, 4 bp, Artificial Sequence
  Description of Artificial Sequence: Synthetic oligonucleotide
  Category: MG29-1 PAM sequences identified in exons 1 to 4 of the human hao-1 gene
  Description: hH29-26 PAM
tttt

SEQ ID NO: 4252 - DNA, 4 bp, Artificial Sequence
  Description of Artificial Sequence: Synthetic oligonucleotide
  Category: MG29-1 PAM sequences identified in exons 1 to 4 of the human hao-1 gene
  Description: hH29-27 PAM
ttta

SEQ ID NO: 4253 - DNA, 4 bp, Artificial Sequence
  Description of Artificial Sequence: Synthetic oligonucleotide
  Category: MG29-1 PAM sequences identified in exons 1 to 4 of the human hao-1 gene
  Description: hH29-28 PAM
tttc

SEQ ID NO: 4254 - DNA, 4 bp, Artificial Sequence
  Description of Artificial Sequence: Synthetic oligonucleotide
  Category: MG29-1 PAM sequences identified in exons 1 to 4 of the human hao-1 gene
  Description: hH29-29 PAM
tttt

SEQ ID NO: 4255 - DNA, 4 bp, Artificial Sequence
  Description of Artificial Sequence: Synthetic oligonucleotide
  Category: MG29-1 PAM sequences identified in exons 1 to 4 of the human hao-1 gene
  Description: hH29-30 PAM
ttta

SEQ ID NO: 4256 - DNA, 4 bp, Artificial Sequence
  Description of Artificial Sequence: Synthetic oligonucleotide
  Category: MG29-1 PAM sequences identified in exons 1 to 4 of the human hao-1 gene
  Description: hH29-31 PAM
tttc

SEQ ID NO: 4257 - DNA, 4 bp, Artificial Sequence
  Description of Artificial Sequence: Synthetic oligonucleotide
  Category: MG29-1 PAM sequences identified in exons 1 to 4 of the human hao-1 gene
  Description: hH29-32 PAM
tttt

SEQ ID NO: 4258 - DNA, 4 bp, Artificial Sequence
  Description of Artificial Sequence: Synthetic oligonucleotide
  Category: MG29-1 PAM sequences identified in exons 1 to 4 of the human hao-1 gene
  Description: hH29-33 PAM
tttt

SEQ ID NO: 4259 - DNA, 4 bp, Artificial Sequence
  Description of Artificial Sequence: Synthetic oligonucleotide
  Category: MG29-1 PAM sequences identified in exons 1 to 4 of the human hao-1 gene
  Description: hH29-34 PAM
tttg

SEQ ID NO: 4260 - DNA, 4 bp, Artificial Sequence
  Description of Artificial Sequence: Synthetic oligonucleotide
  Category: MG29-1 PAM sequences identified in exons 1 to 4 of the human hao-1 gene
  Description: hH29-35 PAM
ttta

SEQ ID NO: 4261 - DNA, 4 bp, Artificial Sequence
  Description of Artificial Sequence: Synthetic oligonucleotide
  Category: MG29-1 PAM sequences identified in exons 1 to 4 of the human hao-1 gene
  Description: hH29-36 PAM
tttt

SEQ ID NO: 4262 - DNA, 4 bp, Artificial Sequence
  Description of Artificial Sequence: Synthetic oligonucleotide
  Category: MG29-1 PAM sequences identified in exons 1 to 4 of the human hao-1 gene
  Description: hH29-37 PAM
tttc

SEQ ID NO: 4263 - DNA, 4 bp, Artificial Sequence
  Description of Artificial Sequence: Synthetic oligonucleotide
  Category: MG29-1 PAM sequences identified in exons 1 to 4 of the human hao-1 gene
  Description: hH29-38 PAM
ttta

SEQ ID NO: 4264 - DNA, 4 bp, Artificial Sequence
  Description of Artificial Sequence: Synthetic oligonucleotide
  Category: MG29-1 PAM sequences identified in exons 1 to 4 of the human hao-1 gene
  Description: hH29-39 PAM
tttt

SEQ ID NO: 4265 - DNA, 4 bp, Artificial Sequence
  Description of Artificial Sequence: Synthetic oligonucleotide
  Category: MG29-1 PAM sequences identified in exons 1 to 4 of the human hao-1 gene
  Description: hH29-40 PAM
tttg

SEQ ID NO: 4266 - DNA, 4 bp, Artificial Sequence
  Description of Artificial Sequence: Synthetic oligonucleotide
  Category: MG29-1 PAM sequences identified in exons 1 to 4 of the human hao-1 gene
  Description: hH29-41 PAM
tttg

SEQ ID NO: 4267 - DNA, 4 bp, Artificial Sequence
  Description of Artificial Sequence: Synthetic oligonucleotide
  Category: MG29-1 PAM sequences identified in exons 1 to 4 of the human hao-1 gene
  Description: hH29-42 PAM
tttg

SEQ ID NO: 4268 - DNA, 22 bp, Artificial Sequence
  Description of Artificial Sequence: Synthetic oligonucleotide
  Category: TRAC spacer
  Description: Guide 35 TRAC spacer
gagtctctcagctggtacacgg

SEQ ID NO: 4269 - DNA, 20 bp, Artificial Sequence
  Description of Artificial Sequence: Synthetic oligonucleotide
  Category: Primers
  Description: Primer F
tgctttgctgggcctttttc

SEQ ID NO: 4270 - DNA, 20 bp, Artificial Sequence
  Description of Artificial Sequence: Synthetic oligonucleotide
  Category: Primers
  Description: Primer R
acagtctgagcaaaggcagg

SEQ ID NO: 4271 - DNA, 20 bp, Artificial Sequence
  Description of Artificial Sequence: Synthetic oligonucleotide
  Category: Primers
  Description: Primer for Sanger sequencing
atcacgagcagctggtttct

SEQ ID NO: 4272 - RNA, 44 nt, Artificial Sequence
  Description of Artificial Sequence: Synthetic oligonucleotide
  Category: Chemically modified MG29-1 sgRNA
  Description: mAlb298-0
cuuaauuucuacuguuguagaucuguaacgaucgggaacuggca

SEQ ID NO: 4273 - RNA, 44 nt, Artificial Sequence; identical to SEQ ID NO: 4272
  Description of Artificial Sequence: Synthetic oligonucleotide
  Category: Chemically modified MG29-1 sgRNA
  Description: mAlb298-1

SEQ ID NO: 4274 - RNA, 44 nt, Artificial Sequence; identical to SEQ ID NO: 4272
  Description of Artificial Sequence: Synthetic oligonucleotide
  Category: Chemically modified MG29-1 sgRNA
  Description: mAlb298-2

SEQ ID NO: 4275 - RNA, 44 nt, Artificial Sequence; identical to SEQ ID NO: 4272
  Description of Artificial Sequence: Synthetic oligonucleotide
  Category: Chemically modified MG29-1 sgRNA
  Description: mAlb298-3

SEQ ID NO: 4276 - RNA, 44 nt, Artificial Sequence; identical to SEQ ID NO: 4272
  Description of Artificial Sequence: Synthetic oligonucleotide
  Category: Chemically modified MG29-1 sgRNA
  Description: mAlb298-4

SEQ ID NO: 4277 - RNA, 44 nt, Artificial Sequence; identical to SEQ ID NO: 4272
  Description of Artificial Sequence: Synthetic oligonucleotide
  Category: Chemically modified MG29-1 sgRNA
  Description: mAlb298-5

SEQ ID NO: 4278 - RNA, 44 nt, Artificial Sequence; identical to SEQ ID NO: 4272
  Description of Artificial Sequence: Synthetic oligonucleotide
  Category: Chemically modified MG29-1 sgRNA
  Description: mAlb298-6

SEQ ID NO: 4279 - RNA, 44 nt, Artificial Sequence; identical to SEQ ID NO: 4272
  Description of Artificial Sequence: Synthetic oligonucleotide
  Category: Chemically modified MG29-1 sgRNA
  Description: mAlb298-7

SEQ ID NO: 4280 - RNA, 44 nt, Artificial Sequence; identical to SEQ ID NO: 4272
  Description of Artificial Sequence: Synthetic oligonucleotide
  Category: Chemically modified MG29-1 sgRNA
  Description: mAlb298-8

SEQ ID NO: 4281 - RNA, 44 nt, Artificial Sequence; identical to SEQ ID NO: 4272
  Description of Artificial Sequence: Synthetic oligonucleotide
  Category: Chemically modified MG29-1 sgRNA
  Description: mAlb298-9

SEQ ID NO: 4282 - RNA, 44 nt, Artificial Sequence; identical to SEQ ID NO: 4272
  Description of Artificial Sequence: Synthetic oligonucleotide
  Category: Chemically modified MG29-1 sgRNA
  Description: mAlb298-10

SEQ ID NO: 4283 - RNA, 44 nt, Artificial Sequence; identical to SEQ ID NO: 4272
  Description of Artificial Sequence: Synthetic oligonucleotide
  Category: Chemically modified MG29-1 sgRNA
  Description: mAlb298-11

SEQ ID NO: 4284 - RNA, 44 nt, Artificial Sequence; identical to SEQ ID NO: 4272
  Description of Artificial Sequence: Synthetic oligonucleotide
  Category: Chemically modified MG29-1 sgRNA
  Description: mAlb298-12

SEQ ID NO: 4285 - RNA, 44 nt, Artificial Sequence; identical to SEQ ID NO: 4272
  Description of Artificial Sequence: Synthetic oligonucleotide
  Category: Chemically modified MG29-1 sgRNA
  Description: mAlb298-13

SEQ ID NO: 4286 - RNA, 44 nt, Artificial Sequence; identical to SEQ ID NO: 4272
  Description of Artificial Sequence: Synthetic oligonucleotide
  Category: Chemically modified MG29-1 sgRNA
  Description: mAlb298-14

SEQ ID NO: 4287 - RNA, 44 nt, Artificial Sequence; identical to SEQ ID NO: 4272
  Description of Artificial Sequence: Synthetic oligonucleotide
  Category: Chemically modified MG29-1 sgRNA
  Description: mAlb298-15

SEQ ID NO: 4288 - RNA, 44 nt, Artificial Sequence; identical to SEQ ID NO: 4272
  Description of Artificial Sequence: Synthetic oligonucleotide
  Category: Chemically modified MG29-1 sgRNA
  Description: mAlb298-16

SEQ ID NO: 4289 - RNA, 44 nt, Artificial Sequence; identical to SEQ ID NO: 4272
  Description of Artificial Sequence: Synthetic oligonucleotide
  Category: Chemically modified MG29-1 sgRNA
  Description: mAlb298-17

SEQ ID NO: 4290 - RNA, 44 nt, Artificial Sequence; identical to SEQ ID NO: 4272
  Description of Artificial Sequence: Synthetic oligonucleotide
  Category: Chemically modified MG29-1 sgRNA
  Description: mAlb298-18

SEQ ID NO: 4291 - RNA, 48 nt, Artificial Sequence
  Description of Artificial Sequence: Synthetic oligonucleotide
  Category: Chemically modified MG29-1 sgRNA
  Description: mAlb298-19
guagcuuaauuucuacuguuguagaucuguaacgaucgggaacuggca

SEQ ID NO: 4292 - RNA, 44 nt, Artificial Sequence; identical to SEQ ID NO: 4272
  Description of Artificial Sequence: Synthetic oligonucleotide
  Category: Chemically modified MG29-1 sgRNA
  Description: mAlb298-20

SEQ ID NO: 4293 - RNA, 44 nt, Artificial Sequence; identical to SEQ ID NO: 4272
  Description of Artificial Sequence: Synthetic oligonucleotide
  Category: Chemically modified MG29-1 sgRNA
  Description: mAlb298-21

SEQ ID NO: 4294 - RNA, 44 nt, Artificial Sequence; identical to SEQ ID NO: 4272
  Description of Artificial Sequence: Synthetic oligonucleotide
  Category: Chemically modified MG29-1 sgRNA
  Description: mAlb298-22

SEQ ID NO: 4295 - RNA, 44 nt, Artificial Sequence; identical to SEQ ID NO: 4272
  Description of Artificial Sequence: Synthetic oligonucleotide
  Category: Chemically modified MG29-1 sgRNA
  Description: mAlb298-23

SEQ ID NO: 4296 - RNA, 44 nt, Artificial Sequence; identical to SEQ ID NO: 4272
  Description of Artificial Sequence: Synthetic oligonucleotide
  Category: Chemically modified MG29-1 sgRNA
  Description: mAlb298-24

SEQ ID NO: 4297 - RNA, 44 nt, Artificial Sequence; identical to SEQ ID NO: 4272
  Description of Artificial Sequence: Synthetic oligonucleotide
  Category: Chemically modified MG29-1 sgRNA
  Description: mAlb298-25

SEQ ID NO: 4298 - RNA, 44 nt, Artificial Sequence; identical to SEQ ID NO: 4272
  Description of Artificial Sequence: Synthetic oligonucleotide
  Category: Chemically modified MG29-1 sgRNA
  Description: mAlb298-26

SEQ ID NO: 4299 - RNA, 46 nt, Artificial Sequence
  Description of Artificial Sequence: Synthetic oligonucleotide
  Category: Chemically modified MG29-1 sgRNA
  Description: mAlb298-27
cuuuuaauuucuacuguuguagaucuguaacgaucgggaacuggca

SEQ ID NO: 4300 - RNA, 46 nt, Artificial Sequence; identical to SEQ ID NO: 4299
  Description of Artificial Sequence: Synthetic oligonucleotide
  Category: Chemically modified MG29-1 sgRNA
  Description: mAlb298-28

SEQ ID NO: 4301 - RNA, 46 nt, Artificial Sequence; identical to SEQ ID NO: 4299
  Description of Artificial Sequence: Synthetic oligonucleotide
  Category: Chemically modified MG29-1 sgRNA
  Description: mAlb298-29

SEQ ID NO: 4302 - RNA, 46 nt, Artificial Sequence; identical to SEQ ID NO: 4299
  Description of Artificial Sequence: Synthetic oligonucleotide
  Category: Chemically modified MG29-1 sgRNA
  Description: mAlb298-30

SEQ ID NO: 4303 - RNA, 44 nt, Artificial Sequence; identical to SEQ ID NO: 4272
  Description of Artificial Sequence: Synthetic oligonucleotide
  Category: Chemically modified MG29-1 sgRNA
  Description: mAlb298-31

SEQ ID NO: 4304 - RNA, 44 nt, Artificial Sequence; identical to SEQ ID NO: 4272
  Description of Artificial Sequence: Synthetic oligonucleotide
  Category: Chemically modified MG29-1 sgRNA
  Description: mAlb298-32

SEQ ID NO: 4305 - RNA, 44 nt, Artificial Sequence; identical to SEQ ID NO: 4272
  Description of Artificial Sequence: Synthetic oligonucleotide
  Category: Chemically modified MG29-1 sgRNA
  Description: mAlb298-33

SEQ ID NO: 4306 - RNA, 44 nt, Artificial Sequence; identical to SEQ ID NO: 4272
  Description of Artificial Sequence: Synthetic oligonucleotide
  Category: Chemically modified MG29-1 sgRNA
  Description: mAlb298-34

SEQ ID NO: 4307 - RNA, 44 nt, Artificial Sequence; identical to SEQ ID NO: 4272
  Description of Artificial Sequence: Synthetic oligonucleotide
  Category: Chemically modified MG29-1 sgRNA
  Description: mAlb298-35

SEQ ID NO: 4308 - RNA, 44 nt, Artificial Sequence; identical to SEQ ID NO: 4272
  Description of Artificial Sequence: Synthetic oligonucleotide
  Category: Chemically modified MG29-1 sgRNA
  Description: mAlb298-36

SEQ ID NO: 4309 - RNA, 46 nt, Artificial Sequence; identical to SEQ ID NO: 4299
  Description of Artificial Sequence: Synthetic oligonucleotide
  Category: Chemically modified MG29-1 sgRNA
  Description: mAlb298-37

SEQ ID NO: 4310 - RNA, 46 nt, Artificial Sequence; identical to SEQ ID NO: 4299
  Description of Artificial Sequence: Synthetic oligonucleotide
  Category: Chemically modified MG29-1 sgRNA
  Description: mAlb298-38

SEQ ID NO: 4311 - RNA, 46 nt, Artificial Sequence; identical to SEQ ID NO: 4299
  Description of Artificial Sequence: Synthetic oligonucleotide
  Category: Chemically modified MG29-1 sgRNA
  Description: mAlb298-39

SEQ ID NO: 4312 - RNA, 46 nt, Artificial Sequence; identical to SEQ ID NO: 4299
  Description of Artificial Sequence: Synthetic oligonucleotide
  Category: Chemically modified MG29-1 sgRNA
  Description: mAlb298-40

SEQ ID NO: 4313 - DNA, 46 bp, Artificial Sequence
  Description of Artificial Sequence: Synthetic oligonucleotide
  Description of Combined DNA/RNA Molecule: Synthetic oligonucleotide
  Category: Chemically modified MG29-1 sgRNA
  Description: mAlb298-41
cuuuuaauuucuacuguugtagatcuguaacgaucgggaacuggca

SEQ ID NO: 4314 - RNA, 46 nt, Artificial Sequence; identical to SEQ ID NO: 4299
  Description of Artificial Sequence: Synthetic oligonucleotide
  Category: Chemically modified MG29-1 sgRNA
  Description: mAlb298-42

SEQ ID NO: 4315 - RNA, 46 nt, Artificial Sequence; identical to SEQ ID NO: 4299
  Description of Artificial Sequence: Synthetic oligonucleotide
  Category: Chemically modified MG29-1 sgRNA
  Description: mAlb298-43

SEQ ID NO: 4316 - DNA, 22 bp, Artificial Sequence
  Description of Artificial Sequence: Synthetic oligonucleotide
  Category: MG29-1 TRAC Guides
  Description: MG29-1 Guide 1 Target Sequence
accgattttgattctcaaacaa

SEQ ID NO: 4317 - DNA, 22 bp, Artificial Sequence
  Description of Artificial Sequence: Synthetic oligonucleotide
  Category: MG29-1 TRAC Guides
  Description: MG29-1 Guide 2 Target Sequence
tgattctcaaacaaatgtgtca

SEQ ID NO: 4318 - DNA, 22 bp, Artificial Sequence
  Description of Artificial Sequence: Synthetic oligonucleotide
  Category: MG29-1 TRAC Guides
  Description: MG29-1 Guide 3 Target Sequence
gattctcaaacaaatgtgtcac

SEQ ID NO: 4319 - DNA, 22 bp, Artificial Sequence
  Description of Artificial Sequence: Synthetic oligonucleotide
  Category: MG29-1 TRAC Guides
  Description: MG29-1 Guide 4 Target Sequence
attctcaaacaaatgtgtcaca

SEQ ID NO: 4320 - DNA, 22 bp, Artificial Sequence
  Description of Artificial Sequence: Synthetic oligonucleotide
  Category: MG29-1 TRAC Guides
  Description: MG29-1 Guide 5 Target Sequence
tcaaacaaatgtgtcacaaagt

SEQ ID NO: 4321 - DNA, 22 bp, Artificial Sequence
  Description of Artificial Sequence: Synthetic oligonucleotide
  Category: MG29-1 TRAC Guides
  Description: MG29-1 Guide 6 Target Sequence
tgatgtgtatatcacagacaaa

SEQ ID NO: 4322 - DNA, 22 bp, Artificial Sequence
  Description of Artificial Sequence: Synthetic oligonucleotide
  Category: MG29-1 TRAC Guides
  Description: MG29-1 Guide 7 Target Sequence
aagagcaacagtgctgtggcct

SEQ ID NO: 4323 - DNA, 22 bp, Artificial Sequence
  Description of Artificial Sequence: Synthetic oligonucleotide
  Category: MG29-1 TRAC Guides
  Description: MG29-1 Guide 8 Target Sequence
gcatgtgcaaacgccttcaaca

SEQ ID NO: 4324 - DNA, 22 bp, Artificial Sequence
  Description of Artificial Sequence: Synthetic oligonucleotide
  Category: MG29-1 TRAC Guides
  Description: MG29-1 Guide 9 Target Sequence
catgtgcaaacgccttcaacaa

SEQ ID NO: 4325 - DNA, 22 bp, Artificial Sequence
  Description of Artificial Sequence: Synthetic oligonucleotide
  Category: MG29-1 TRAC Guides
  Description: MG29-1 Guide 10 Target Sequence
aacaacagcattattccagaag

SEQ ID NO: 4326 - DNA, 22 bp, Artificial Sequence
  Description of Artificial Sequence: Synthetic oligonucleotide
  Category: MG29-1 TRAC Guides
  Description: MG29-1 Guide 11 Target Sequence
ttccagaagacaccttcttccc

SEQ ID NO: 4327 - DNA, 22 bp, Artificial Sequence
  Description of Artificial Sequence: Synthetic oligonucleotide
  Category: MG29-1 TRAC Guides
  Description: MG29-1 Guide 12 Target Sequence
cagaagacaccttcttccccag

SEQ ID NO: 4328 - DNA, 22 bp, Artificial Sequence
  Description of Artificial Sequence: Synthetic oligonucleotide
  Category: MG29-1 TRAC Guides
  Description: MG29-1 Guide 13 Target Sequence
tggaataatgctgttgttgaag

SEQ ID NO: 4329 - DNA, 22 bp, Artificial Sequence
  Description of Artificial Sequence: Synthetic oligonucleotide
  Category: MG29-1 TRAC Guides
  Description: MG29-1 Guide 14 Target Sequence
ttgaaggcgtttgcacatgcaa

SEQ ID NO: 4330 - DNA, 22 bp, Artificial Sequence
  Description of Artificial Sequence: Synthetic oligonucleotide
  Category: MG29-1 TRAC Guides
  Description: MG29-1 Guide 15 Target Sequence
aaggcgtttgcacatgcaaagt

SEQ ID NO: 4331 - DNA, 22 bp, Artificial Sequence
  Description of Artificial Sequence: Synthetic oligonucleotide
  Category: MG29-1 TRAC Guides
  Description: MG29-1 Guide 16 Target Sequence
gcacatgcaaagtcagatttgt

SEQ ID NO: 4332 - DNA, 22 bp, Artificial Sequence
  Description of Artificial Sequence: Synthetic oligonucleotide
  Category: MG29-1 TRAC Guides
  Description: MG29-1 Guide 17 Target Sequence
cacatgcaaagtcagatttgtt

SEQ ID NO: 4333 - DNA, 22 bp, Artificial Sequence
  Description of Artificial Sequence: Synthetic oligonucleotide
  Category: MG29-1 TRAC Guides
  Description: MG29-1 Guide 18 Target Sequence
gttgctccaggccacagcactg

SEQ ID NO: 4334 - DNA, 22 bp, Artificial Sequence
  Description of Artificial Sequence: Synthetic oligonucleotide
  Category: MG29-1 TRAC Guides
  Description: MG29-1 Guide 19 Target Sequence
ttgctccaggccacagcactgt

SEQ ID NO: 4335 - DNA, 22 bp, Artificial Sequence
  Description of Artificial Sequence: Synthetic oligonucleotide
  Category: MG29-1 TRAC Guides
  Description: MG29-1 Guide 20 Target Sequence
ctccaggccacagcactgttgc

SEQ ID NO: 4336 - DNA, 22 bp, Artificial Sequence
  Description of Artificial Sequence: Synthetic oligonucleotide
  Category: MG29-1 TRAC Guides
  Description: MG29-1 Guide 21 Target Sequence
ctcttgaagtccatagacctca

SEQ ID NO: 4337 - DNA, 22 bp, Artificial Sequence
  Description of Artificial Sequence: Synthetic oligonucleotide
  Category: MG29-1 TRAC Guides
  Description: MG29-1 Guide 22 Target Sequence
aagtccatagacctcatgtcta

SEQ ID NO: 4338 - DNA, 22 bp, Artificial Sequence
  Description of Artificial Sequence: Synthetic oligonucleotide
  Category: MG29-1 TRAC Guides
  Description: MG29-1 Guide 23 Target Sequence
tgtctgtgatatacacatcaga

SEQ ID NO: 4339 - DNA, 22 bp, Artificial Sequence
  Description of Artificial Sequence: Synthetic oligonucleotide
  Category: MG29-1 TRAC Guides
  Description: MG29-1 Guide 24 Target Sequence
gtctgtgatatacacatcagaa

SEQ ID NO: 4340 - DNA, 22 bp, Artificial Sequence
  Description of Artificial Sequence: Synthetic oligonucleotide
  Category: MG29-1 TRAC Guides
  Description: MG29-1 Guide 25 Target Sequence
tctgtgatatacacatcagaat

SEQ ID NO: 4341 - DNA, 22 bp, Artificial Sequence
  Description of Artificial Sequence: Synthetic oligonucleotide
  Category: MG29-1 TRAC Guides
  Description: MG29-1 Guide 26 Target Sequence
ctttgtgacacatttgtttgag

SEQ ID NO: 4342 - DNA, 22 bp, Artificial Sequence
  Description of Artificial Sequence: Synthetic oligonucleotide
  Category: MG29-1 TRAC Guides
  Description: MG29-1 Guide 27 Target Sequence
gtgacacatttgtttgagaatc

SEQ ID NO: 4343 - DNA, 22 bp, Artificial Sequence
  Description of Artificial Sequence: Synthetic oligonucleotide
  Category: MG29-1 TRAC Guides
  Description: MG29-1 Guide 28 Target Sequence
tgacacatttgtttgagaatca

SEQ ID NO: 4344 - DNA, 22 bp, Artificial Sequence
  Description of Artificial Sequence: Synthetic oligonucleotide
  Category: MG29-1 TRAC Guides
  Description: MG29-1 Guide 29 Target Sequence
gtttgagaatcaaaatcggtga

SEQ ID NO: 4345 - DNA, 22 bp, Artificial Sequence
  Description of Artificial Sequence: Synthetic oligonucleotide
  Category: MG29-1 TRAC Guides
  Description: MG29-1 Guide 30 Target Sequence
tttgagaatcaaaatcggtgaa

SEQ ID NO: 4346 - DNA, 22 bp, Artificial Sequence
  Description of Artificial Sequence: Synthetic oligonucleotide
  Category: MG29-1 TRAC Guides
  Description: MG29-1 Guide 31 Target Sequence
gagaatcaaaatcggtgaatag

SEQ ID NO: 4347 - DNA, 22 bp, Artificial Sequence
  Description of Artificial Sequence: Synthetic oligonucleotide
  Category: MG29-1 TRAC Guides
  Description: MG29-1 Guide 32 Target Sequence
agaatcaaaatcggtgaatagg

SEQ ID NO: 4348 - DNA, 22 bp, Artificial Sequence
  Description of Artificial Sequence: Synthetic oligonucleotide
  Category: MG29-1 TRAC Guides
  Description: MG29-1 Guide 33 Target Sequence
tcactggatttagagtctctca

SEQ ID NO: 4349 - DNA, 22 bp, Artificial Sequence
  Description of Artificial Sequence: Synthetic oligonucleotide
  Category: MG29-1 TRAC Guides
  Description: MG29-1 Guide 34 Target Sequence
agagtctctcagctggtacacg

SEQ ID NO: 4350 - DNA, 22 bp, Artificial Sequence
  Description of Artificial Sequence: Synthetic oligonucleotide
  Category: MG29-1 TRAC Guides
  Description: MG29-1 Guide 35 Target Sequence
gagtctctcagctggtacacgg

SEQ ID NO: 4351 - DNA, 22 bp, Artificial Sequence
  Description of Artificial Sequence: Synthetic oligonucleotide
  Category: MG29-1 TRAC Guides
  Description: MG29-1 Guide 36 Target Sequence
ctgtgatgtcaagctggtcgag

SEQ ID NO: 4352 - DNA, 22 bp, Artificial Sequence
  Description of Artificial Sequence: Synthetic oligonucleotide
  Category: MG29-1 TRAC Guides
  Description: MG29-1 Guide 37 Target Sequence
caaagcttttctcgaccagctt

SEQ ID NO: 4353 - DNA, 22 bp, Artificial Sequence
  Description of Artificial Sequence: Synthetic oligonucleotide
  Category: MG29-1 TRAC Guides
  Description: MG29-1 Guide 38 Target Sequence
aaagcttttctcgaccagcttg

SEQ ID NO: 4354 - DNA, 22 bp, Artificial Sequence
  Description of Artificial Sequence: Synthetic oligonucleotide
  Category: MG29-1 TRAC Guides
  Description: MG29-1 Guide 39 Target Sequence
tctcgaccagcttgacatcaca

SEQ ID NO: 4355 - DNA, 22 bp, Artificial Sequence
  Description of Artificial Sequence: Synthetic oligonucleotide
  Category: MG29-1 TRAC Guides
  Description: MG29-1 Guide 40 Target Sequence
ctcgaccagcttgacatcacag

SEQ ID NO: 4356 - DNA, 22 bp, Artificial Sequence
  Description of Artificial Sequence: Synthetic oligonucleotide
  Category: MG29-1 TRAC Guides
  Description: MG29-1 Guide 41 Target Sequence
tcgaccagcttgacatcacagg

SEQ ID NO: 4357 - DNA, 22 bp, Artificial Sequence
  Description of Artificial Sequence: Synthetic oligonucleotide
  Category: MG29-1 TRAC Guides
  Description: MG29-1 Guide 42 Target Sequence
caaaacctgtcagtgattgggt

SEQ ID NO: 4358 - DNA, 22 bp, Artificial Sequence
  Description of Artificial Sequence: Synthetic oligonucleotide
  Category: MG29-1 TRAC Guides
  Description: MG29-1 Guide 43 Target Sequence
aaaacctgtcagtgattgggtt

SEQ ID NO: 4359 - DNA, 22 bp, Artificial Sequence
  Description of Artificial Sequence: Synthetic oligonucleotide
  Category: MG29-1 TRAC Guides
  Description: MG29-1 Guide 44 Target Sequence
ggttccgaatcctcctcctgaa

SEQ ID NO: 4360 - DNA, 22 bp, Artificial Sequence
  Description of Artificial Sequence: Synthetic oligonucleotide
  Category: MG29-1 TRAC Guides
  Description: MG29-1 Guide 45 Target Sequence
cgaatcctcctcctgaaagtgg

SEQ ID NO: 4361 - DNA, 22 bp, Artificial Sequence
  Description of Artificial Sequence: Synthetic oligonucleotide
  Category: MG29-1 TRAC Guides
  Description: MG29-1 Guide 46 Target Sequence
aatctgctcatgacgctgcggc

SEQ ID NO: 4362 - DNA, 22 bp, Artificial Sequence
  Description of Artificial Sequence: Synthetic oligonucleotide
  Category: MG29-1 TRAC Guides
  Description: MG29-1 Guide 47 Target Sequence
atctgctcatgacgctgcggct

SEQ ID NO: 4363 - DNA, 22 bp, Artificial Sequence
  Description of Artificial Sequence: Synthetic oligonucleotide
  Category: MG29-1 TRAC Guides
  Description: MG29-1 Guide 48 Target Sequence
aacccggccactttcaggagga

SEQ ID NO: 4364 - DNA, 22 bp, Artificial Sequence
  Description of Artificial Sequence: Synthetic oligonucleotide
  Category: MG29-1 TRAC Guides
  Description: MG29-1 Guide 49 Target Sequence
caggaggaggattcggaaccca

SEQ ID NO: 4365 - DNA, 22 bp, Artificial Sequence
  Description of Artificial Sequence: Synthetic oligonucleotide
  Category: MG29-1 TRAC Guides
  Description: MG29-1 Guide 50 Target Sequence
aggaggaggattcggaacccaa

SEQ ID NO: 4366 - DNA, 22 bp, Artificial Sequence
  Description of Artificial Sequence: Synthetic oligonucleotide
  Category: MG29-1 TRAC Guides
  Description: MG29-1 Guide 51 Target Sequence
ggaacccaatcactgacaggtt

SEQ ID NO: 4367 - DNA, 22 bp, Artificial Sequence
  Description of Artificial Sequence: Synthetic oligonucleotide
  Category: MG29-1 TRAC Guides
  Description: MG29-1 Guide 52 Target Sequence
tgaaagtttaggttcgtatctg

SEQ ID NO: 4368 - DNA, 22 bp, Artificial Sequence
  Description of Artificial Sequence: Synthetic oligonucleotide
  Category: MG29-1 TRAC Guides
  Description: MG29-1 Guide 53 Target Sequence
gaaagtttaggttcgtatctgt

SEQ ID NO: 4369 - DNA, 22 bp, Artificial Sequence
  Description of Artificial Sequence: Synthetic oligonucleotide
  Category: MG29-1 TRAC Guides
  Description: MG29-1 Guide 54 Target Sequence
aaagtttaggttcgtatctgta

SEQ ID NO: 4370 - RNA, 42 nt, Artificial Sequence
  Description of Artificial Sequence: Synthetic oligonucleotide
  Category: MG29-1 TRAC Guides
  Description: MG29-1 Guide 1 sgRNA synthesized
uaauuucuacuguuguagauaccgauuuugauucucaaacaa

SEQ ID NO: 4371 - RNA, 42 nt, Artificial Sequence
  Description of Artificial Sequence: Synthetic oligonucleotide
  Category: MG29-1 TRAC Guides
  Description: MG29-1 Guide 2 sgRNA synthesized
uaauuucuacuguuguagauugauucucaaacaaauguguca

SEQ ID NO: 4372 - RNA, 42 nt, Artificial Sequence
  Description of Artificial Sequence: Synthetic oligonucleotide
  Category: MG29-1 TRAC Guides
  Description: MG29-1 Guide 3 sgRNA synthesized
uaauuucuacuguuguagaugauucucaaacaaaugugucac

SEQ ID NO: 4373 - RNA, 42 nt, Artificial Sequence
  Description of Artificial Sequence: Synthetic oligonucleotide
  Category: MG29-1 TRAC Guides
  Description: MG29-1 Guide 4 sgRNA synthesized
uaauuucuacuguuguagauauucucaaacaaaugugucaca

SEQ ID NO: 4374 - RNA, 42 nt, Artificial Sequence
  Description of Artificial Sequence: Synthetic oligonucleotide
  Category: MG29-1 TRAC Guides
  Description: MG29-1 Guide 5 sgRNA synthesized
uaauuucuacuguuguagauucaaacaaaugugucacaaagu

SEQ ID NO: 4375 - RNA, 42 nt, Artificial Sequence
  Description of Artificial Sequence: Synthetic oligonucleotide
  Category: MG29-1 TRAC Guides
  Description: MG29-1 Guide 6 sgRNA synthesized
uaauuucuacuguuguagauugauguguauaucacagacaaa

SEQ ID NO: 4376 - RNA, 42 nt, Artificial Sequence
  Description of Artificial Sequence: Synthetic oligonucleotide
  Category: MG29-1 TRAC Guides
  Description: MG29-1 Guide 7 sgRNA synthesized
uaauuucuacuguuguagauaagagcaacagugcuguggccu

SEQ ID NO: 4377 - RNA, 42 nt, Artificial Sequence
  Description of Artificial Sequence: Synthetic oligonucleotide
  Category: MG29-1 TRAC Guides
  Description: MG29-1 Guide 8 sgRNA synthesized
uaauuucuacuguuguagaugcaugugcaaacgccuucaaca

SEQ ID NO: 4378 - RNA, 42 nt, Artificial Sequence
  Description of Artificial Sequence: Synthetic oligonucleotide
  Category: MG29-1 TRAC Guides
  Description: MG29-1 Guide 9 sgRNA synthesized
uaauuucuacuguuguagaucaugugcaaacgccuucaacaa

SEQ ID NO: 4379 - RNA, 42 nt, Artificial Sequence
  Description of Artificial Sequence: Synthetic oligonucleotide
  Category: MG29-1 TRAC Guides
  Description: MG29-1 Guide 10 sgRNA synthesized
uaauuucuacuguuguagauaacaacagcauuauuccagaag

SEQ ID NO: 4380 - RNA, 42 nt, Artificial Sequence
  Description of Artificial Sequence: Synthetic oligonucleotide
  Category: MG29-1 TRAC Guides
  Description: MG29-1 Guide 11 sgRNA synthesized
uaauuucuacuguuguagauuuccagaagacaccuucuuccc

SEQ ID NO: 4381 - RNA, 42 nt, Artificial Sequence
  Description of Artificial Sequence: Synthetic oligonucleotide
  Category: MG29-1 TRAC Guides
  Description: MG29-1 Guide 12 sgRNA synthesized
uaauuucuacuguuguagaucagaagacaccuucuuccccag

SEQ ID NO: 4382 - RNA, 42 nt, Artificial Sequence
  Description of Artificial Sequence: Synthetic oligonucleotide
  Category: MG29-1 TRAC Guides
  Description: MG29-1 Guide 13 sgRNA synthesized
uaauuucuacuguuguagauuggaauaaugcuguuguugaag

SEQ ID NO: 4383 - RNA, 42 nt, Artificial Sequence
  Description of Artificial Sequence: Synthetic oligonucleotide
  Category: MG29-1 TRAC Guides
  Description: MG29-1 Guide 14 sgRNA synthesized
uaauuucuacuguuguagauuugaaggcguuugcacaugcaa

SEQ ID NO: 4384 - RNA, 42 nt, Artificial Sequence
  Description of Artificial Sequence: Synthetic oligonucleotide
  Category: MG29-1 TRAC Guides
  Description: MG29-1 Guide 15 sgRNA synthesized
uaauuucuacuguuguagauaaggcguuugcacaugcaaagu

SEQ ID NO: 4385 - RNA, 42 nt, Artificial Sequence
  Description of Artificial Sequence: Synthetic oligonucleotide
  Category: MG29-1 TRAC Guides
  Description: MG29-1 Guide 16 sgRNA synthesized
uaauuucuacuguuguagaugcacaugcaaagucagauuugu

SEQ ID NO: 4386 - RNA, 42 nt, Artificial Sequence
  Description of Artificial Sequence: Synthetic oligonucleotide
  Category: MG29-1 TRAC Guides
  Description: MG29-1 Guide 17 sgRNA synthesized
uaauuucuacuguuguagaucacaugcaaagucagauuuguu

SEQ ID NO: 4387 - RNA, 42 nt, Artificial Sequence
  Description of Artificial Sequence: Synthetic oligonucleotide
  Category: MG29-1 TRAC Guides
  Description: MG29-1 Guide 18 sgRNA synthesized
uaauuucuacuguuguagauguugcuccaggccacagcacug

SEQ ID NO: 4388 - RNA, 42 nt, Artificial Sequence
  Description of Artificial Sequence: Synthetic oligonucleotide
  Category: MG29-1 TRAC Guides
  Description: MG29-1 Guide 19 sgRNA synthesized
uaauuucuacuguuguagauuugcuccaggccacagcacugu

SEQ ID NO: 4389 - RNA, 42 nt, Artificial Sequence
  Description of Artificial Sequence: Synthetic oligonucleotide
  Category: MG29-1 TRAC Guides
  Description: MG29-1 Guide 20 sgRNA synthesized
uaauuucuacuguuguagaucuccaggccacagcacuguugc

SEQ ID NO: 4390 - RNA, 42 nt, Artificial Sequence
  Description of Artificial Sequence: Synthetic oligonucleotide
  Category: MG29-1 TRAC Guides
  Description: MG29-1 Guide 21 sgRNA synthesized
uaauuucuacuguuguagaucucuugaaguccauagaccuca

SEQ ID NO: 4391 - RNA, 42 nt, Artificial Sequence
  Description of Artificial Sequence: Synthetic oligonucleotide
  Category: MG29-1 TRAC Guides
  Description: MG29-1 Guide 22 sgRNA synthesized
uaauuucuacuguuguagauaaguccauagaccucaugucua

SEQ ID NO: 4392 - RNA, 42 nt, Artificial Sequence
  Description of Artificial Sequence: Synthetic oligonucleotide
  Category: MG29-1 TRAC Guides
  Description: MG29-1 Guide 23 sgRNA synthesized
uaauuucuacuguuguagauugucugugauauacacaucaga

SEQ ID NO: 4393 - RNA, 42 nt, Artificial Sequence
  Description of Artificial Sequence: Synthetic oligonucleotide
  Category: MG29-1 TRAC Guides
  Description: MG29-1 Guide 24 sgRNA synthesized
uaauuucuacuguuguagaugucugugauauacacaucagaa

SEQ ID NO: 4394 - RNA, 42 nt, Artificial Sequence
  Description of Artificial Sequence: Synthetic oligonucleotide
  Category: MG29-1 TRAC Guides
  Description: MG29-1 Guide 25 sgRNA synthesized
uaauuucuacuguuguagauucugugauauacacaucagaau

SEQ ID NO: 4395 - RNA, 42 nt, Artificial Sequence
  Description of Artificial Sequence: Synthetic oligonucleotide
  Category: MG29-1 TRAC Guides
  Description: MG29-1 Guide 26 sgRNA synthesized
uaauuucuacuguuguagaucuuugugacacauuuguuugag

SEQ ID NO: 4396 - RNA, 42 nt, Artificial Sequence
  Description of Artificial Sequence: Synthetic oligonucleotide
  Category: MG29-1 TRAC Guides
  Description: MG29-1 Guide 27 sgRNA synthesized
uaauuucuacuguuguagaugugacacauuuguuugagaauc

SEQ ID NO: 4397 - RNA, 42 nt, Artificial Sequence
  Description of Artificial Sequence: Synthetic oligonucleotide
  Category: MG29-1 TRAC Guides
  Description: MG29-1 Guide 28 sgRNA synthesized
uaauuucuacuguuguagauugacacauuuguuugagaauca

SEQ ID NO: 4398 - RNA, 42 nt, Artificial Sequence
  Description of Artificial Sequence: Synthetic oligonucleotide
  Category: MG29-1 TRAC Guides
  Description: MG29-1 Guide 29 sgRNA synthesized
uaauuucuacuguuguagauguuugagaaucaaaaucgguga

SEQ ID NO: 4399 - RNA, 42 nt, Artificial Sequence
  Description of Artificial Sequence: Synthetic oligonucleotide
  Category: MG29-1 TRAC Guides
  Description: MG29-1 Guide 30 sgRNA synthesized
uaauuucuacuguuguagauuuugagaaucaaaaucggugaa

SEQ ID NO: 4400 - RNA, 42 nt, Artificial Sequence
  Description of Artificial Sequence: Synthetic oligonucleotide
  Category: MG29-1 TRAC Guides
  Description: MG29-1 Guide 31 sgRNA synthesized
uaauuucuacuguuguagaugagaaucaaaaucggugaauag

SEQ ID NO: 4401 - RNA, 42 nt, Artificial Sequence
  Description of Artificial Sequence: Synthetic oligonucleotide
  Category: MG29-1 TRAC Guides
  Description: MG29-1 Guide 32 sgRNA synthesized
uaauuucuacuguuguagauagaaucaaaaucggugaauagg

SEQ ID NO: 4402 - RNA, 42 nt, Artificial Sequence
  Description of Artificial Sequence: Synthetic oligonucleotide
  Category: MG29-1 TRAC Guides
  Description: MG29-1 Guide 33 sgRNA synthesized
uaauuucuacuguuguagauucacuggauuuagagucucuca

SEQ ID NO: 4403 - RNA, 42 nt, Artificial Sequence
  Description of Artificial Sequence: Synthetic oligonucleotide
  Category: MG29-1 TRAC Guides
  Description: MG29-1 Guide 34 sgRNA synthesized
uaauuucuacuguuguagauagagucucucagcugguacacg

SEQ ID NO: 4404 - RNA, 42 nt, Artificial Sequence
  Description of Artificial Sequence: Synthetic oligonucleotide
  Category: MG29-1 TRAC Guides
  Description: MG29-1 Guide 35 sgRNA synthesized
uaauuucuacuguuguagaugagucucucagcugguacacgg

SEQ ID NO: 4405 - RNA, 42 nt, Artificial Sequence
  Description of Artificial Sequence: Synthetic oligonucleotide
  Category: MG29-1 TRAC Guides
  Description: MG29-1 Guide 36 sgRNA synthesized
uaauuucuacuguuguagaucugugaugucaagcuggucgag

SEQ ID NO: 4406 - RNA, 42 nt, Artificial Sequence
  Description of Artificial Sequence: Synthetic oligonucleotide
  Category: MG29-1 TRAC Guides
  Description: MG29-1 Guide 37 sgRNA synthesized
uaauuucuacuguuguagaucaaagcuuuucucgaccagcuu

SEQ ID NO: 4407 - RNA, 42 nt, Artificial Sequence
  Description of Artificial Sequence: Synthetic oligonucleotide
  Category: MG29-1 TRAC Guides
  Description: MG29-1 Guide 38 sgRNA synthesized
uaauuucuacuguuguagauaaagcuuuucucgaccagcuug

SEQ ID NO: 4408 - RNA, 42 nt, Artificial Sequence
  Description of Artificial Sequence: Synthetic oligonucleotide
  Category: MG29-1 TRAC Guides
  Description: MG29-1 Guide 39 sgRNA synthesized
uaauuucuacuguuguagauucucgaccagcuugacaucaca

SEQ ID NO: 4409 - RNA, 42 nt, Artificial Sequence
  Description of Artificial Sequence: Synthetic oligonucleotide
  Category: MG29-1 TRAC Guides
  Description: MG29-1 Guide 40 sgRNA synthesized
uaauuucuacuguuguagaucucgaccagcuugacaucacag

SEQ ID NO: 4410 - RNA, 42 nt, Artificial Sequence
  Description of Artificial Sequence: Synthetic oligonucleotide
  Category: MG29-1 TRAC Guides
  Description: MG29-1 Guide 41 sgRNA synthesized
uaauuucuacuguuguagauucgaccagcuugacaucacagg

SEQ ID NO: 4411 - RNA, 42 nt, Artificial Sequence
  Description of Artificial Sequence: Synthetic oligonucleotide
  Category: MG29-1 TRAC Guides
  Description: MG29-1 Guide 42 sgRNA synthesized
uaauuucuacuguuguagaucaaaaccugucagugauugggu

SEQ ID NO: 4412 - RNA, 42 nt, Artificial Sequence
  Description of Artificial Sequence: Synthetic oligonucleotide
  Category: MG29-1 TRAC Guides
  Description: MG29-1 Guide 43 sgRNA synthesized
uaauuucuacuguuguagauaaaaccugucagugauuggguu

SEQ ID NO: 4413 - RNA, 42 nt, Artificial Sequence
  Description of Artificial Sequence: Synthetic oligonucleotide
  Category: MG29-1 TRAC Guides
  Description: MG29-1 Guide 44 sgRNA synthesized
uaauuucuacuguuguagaugguuccgaauccuccuccugaa

SEQ ID NO: 4414 - RNA, 42 nt, Artificial Sequence
  Description of Artificial Sequence: Synthetic oligonucleotide
  Category: MG29-1 TRAC Guides
  Description: MG29-1 Guide 45 sgRNA synthesized
uaauuucuacuguuguagaucgaauccuccuccugaaagugg

SEQ ID NO: 4415 - RNA, 42 nt, Artificial Sequence
  Description of Artificial Sequence: Synthetic oligonucleotide
  Category: MG29-1 TRAC Guides
  Description: MG29-1 Guide 46 sgRNA synthesized
uaauuucuacuguuguagauaaucugcucaugacgcugcggc

SEQ ID NO: 4416 - RNA, 42 nt, Artificial Sequence
  Description of Artificial Sequence: Synthetic oligonucleotide
  Category: MG29-1 TRAC Guides
  Description: MG29-1 Guide 47 sgRNA synthesized
uaauuucuacuguuguagauaucugcucaugacgcugcggcu

SEQ ID NO: 4417 - RNA, 42 nt, Artificial Sequence
  Description of Artificial Sequence: Synthetic oligonucleotide
  Category: MG29-1 TRAC Guides
  Description: MG29-1 Guide 48 sgRNA synthesized
uaauuucuacuguuguagauaacccggccacuuucaggagga

SEQ ID NO: 4418 - RNA, 42 nt, Artificial Sequence
  Description of Artificial Sequence: Synthetic oligonucleotide
  Category: MG29-1 TRAC Guides
  Description: MG29-1 Guide 49 sgRNA synthesized
uaauuucuacuguuguagaucaggaggaggauucggaaccca

SEQ ID NO: 4419 - RNA, 42 nt, Artificial Sequence
  Description of Artificial Sequence: Synthetic oligonucleotide
  Category: MG29-1 TRAC Guides
  Description: MG29-1 Guide 50 sgRNA synthesized
uaauuucuacuguuguagauaggaggaggauucggaacccaa

SEQ ID NO: 4420 - RNA, 42 nt, Artificial Sequence
  Description of Artificial Sequence: Synthetic oligonucleotide
  Category: MG29-1 TRAC Guides
  Description: MG29-1 Guide 51 sgRNA synthesized
uaauuucuacuguuguagauggaacccaaucacugacagguu

SEQ ID NO: 4421 - RNA, 42 nt, Artificial Sequence
  Description of Artificial Sequence: Synthetic oligonucleotide
  Category: MG29-1 TRAC Guides
  Description: MG29-1 Guide 52 sgRNA synthesized
uaauuucuacuguuguagauugaaaguuuagguucguaucug

SEQ ID NO: 4422 - RNA, 42 nt, Artificial Sequence
  Description of Artificial Sequence: Synthetic oligonucleotide
  Category: MG29-1 TRAC Guides
  Description: MG29-1 Guide 53 sgRNA synthesized
uaauuucuacuguuguagaugaaaguuuagguucguaucugu

SEQ ID NO: 4423 - RNA, 42 nt, Artificial Sequence
  Description of Artificial Sequence: Synthetic oligonucleotide
  Category: MG29-1 TRAC Guides
  Description: MG29-1 Guide 54 sgRNA synthesized
uaauuucuacuguuguagauaaaguuuagguucguaucugua

SEQ ID NO: 4424 - DNA, 504 bp, Artificial Sequence
  Description of Artificial Sequence: Synthetic polynucleotide
  Category: Transgene donor (AAV genome) #3028
  Description: Transgene 5' homology arm
ttaattaatgccaacataccataaacctcccattctgctaatgcccagcctaagttggggagaccactccagattccaagatgtacagtttgctttgctgggcctttttcccatgcctgcctttactctgccagagttatattgctggggttttgaagaagatcctattaaataaaagaataagcagtattattaagtagccctgcatttcaggtttccttgagtggcaggccaggcctggccgtgaacgttcactgaaatcatggcctcttggccaagattgatagcttgtgcctgtccctgagtcccagtccatcacgagcagctggtttctaagatgctatttcccgtataaagcatgagaccgtgacttgccagccccacagagccccgcccttgtccatcactggcatctggactccagcctgggttggggcaaagagggaaatgagatcatgtcctaaccctgatcctcttgtcccacagatatccagaaccctgacc

SEQ ID NO: 4425 - DNA, 378 bp, Artificial Sequence
  Description of Artificial Sequence: Synthetic polynucleotide
  Category: Transgene donor (AAV genome) #3028
  Description: Transgene 3' homology arm
tgaaagcttgataatcaacctctggattacaaaatttgtgaaagattgactggtattcttaactatgttgctccttttacgctatgtggatacgctgctttaatgcctttgtatcatgctattgcttcccgtatggctttcattttctcctccttgtataaatcctggttagttcttgccacggcggaactcatcgccgcctgccttgcccgctgctggacaggggctcggctgttgggcactgacaattccgtggaacttgtttattgcagcttataatggttacaaataaagcaatagcatcacaaatttcacaaataaagcatttttttcactgcattctagttgtggtttgtccaaactcatcaatgtatctta
